(19) United States
(12) Patent Application Publication
(10) Pub. No.: US 2014/0193824 A1
(43) Pub. Date: Jul. 10, 2014

(54) High-Resolution Clonal Typing of Escherichia coli

(71) Applicants: Evgeni V. SOKURENKO, Seattle, WA (US); James R. JOHNSON, Minneapolis, MN (US); Scott WEISSMAN, Seattle, WA (US); Veronika TCHESNOKOVA, Seattle, WA (US)

(72) Inventors: Evgeni V. SOKURENKO, Seattle, WA (US); James R. JOHNSON, Minneapolis, MN (US); Scott WEISSMAN, Seattle, WA (US); Veronika TCHESNOKOVA, Seattle, WA (US)

(21) Appl. No.: 14/146,427

(22) Filed: Jan. 2, 2014

Related U.S. Application Data
(60) Provisional application No. 61/749,144, filed on Jan. 4, 2013.

(51) Int. Cl. C12Q 1/68

(52) U.S. Cl. CPC C12Q 1/689
USPC 435/6.12; 536/24.33

(57) ABSTRACT

The present invention provides methods and compositions for high-resolution clonal typing of Escherichia coli.

### CROSS REFERENCE

[0001] This application is related to U.S. provisional patent application Ser. No. 61/749,144, filed Jan. 4, 2013, the disclosure of which is incorporated by reference herein in its entirety.

### STATEMENT REGARDING FEDERALLY SPONSORED RESEARCH

[0002] This invention was made with U.S. government support under K08 award AI057737A, awarded by the National Institutes of Allergy and Infectious Diseases and under ARRA award RC4AI092828, awarded by the National Institutes of Health. The U.S. Government has certain rights in the invention.

### BACKGROUND

[0003] Standard multilocus sequence typing (MLST) is usually based on the sequencing of 5 to 8 housekeeping loci in the bacterial chromosome and has provided detailed descriptions of the population structure of bacterial species important to human health. However, even strains with identical MLST profiles (known as sequence types or STs) may possess distinct genotypes, which enable different eco- or pathotypic lifestyles. There is a need for sequence typing that provides a genotyping tool for molecular epidemiology analysis that is more economical than standard 7-locus MLST, but has superior clonal discrimination power and, at the same time, corresponds closely to MLST-based clonal groupings.

### SUMMARY OF THE INVENTION

[0004] In a first aspect, the present invention provides a method of typing Escherichia coli in a sample comprising: (a) determining a nucleic acid sequence in the sample of Escherichia coli (E. coli) type 1 fimbrial adhesion (fimH) gene and a further E. coli gene selected from the group consisting of: fumC, adk, gyrB, icd, mdh, purA, and recA to identify a clonotype of the sample; and (b) typing E. coli present in the sample based on the clonotype.

[0005] The inventors have surprisingly discovered that methods of the present invention provide the clonal identities of clinical E. coli isolates, which are linked to distinct antimicrobial susceptibility profiles and clinical manifestations. These findings indicate that a clonotype-guided approach substantially reduces the likelihood of drug-bug mismatches during the course of initial antimicrobial therapy by providing more specific data about a patient's actual organism. Furthermore, the methods of the invention provided greater certainty from the outset regarding which antimicrobials can and cannot be used reliably for a given patient with suspected E. coli infection will be of great benefit to patients and health care systems alike.

[0006] In other embodiments of the invention, the methods of the invention may be used as a rapid sequence typing scheme for E. coli that preserves the phylogenetic signal, has superior discriminatory power, and resolves clinically important sub-lineages within sequence types. It therefore can serve as a cost-effective alternative to the two most-commonly used clonal typing methods for E. coli, (i) multilocus sequence typing (MLST) and (ii) pulsed-field gel electrophoresis (PFGE), which are poorly suited for associating genetic lineages with susceptibility profiles in clinical practice due to their high costs, slow turnaround times, and/or unsuitably low (for MLST) or variable (for PFGE) levels of discrimination. The clonotyping of the invention is applicable as a molecular tool for both applied and basic investigations regarding the epidemiology and population structure of E. coli.

[0007] In some embodiments, the sample is a biological sample from a subject, and the typing indicates presence of antibiotic resistant E. coli in the subject, or is used to diagnose or prognose a disease state in the subject. In some embodiments, the typing indicates that the subject is infected with antibiotic resistant E. coli; and/or the subject is at risk of having a urinary tract infection or sepsis, and the typing is used to diagnose and/or prognose a urinary tract infection or sepsis in the subject. In additional embodiments, the typing indicates efficacy of an antibiotic treatment (e.g., ampicillin (AMP), tetracycline (TET), ampicillin-sulbactam (A/S), trimethoprimsulfamethoxazole (T/S), amoxicillin-clavulanate (A/K), cefazolin (CZ), ciprofloxacin (CIP), gentamicin (GM), nitrofurantoin (NIT), ceftriaxone (CTR) and/or piperacillin-tazobactam (PTZ)) for the subject.

[0008] In one embodiment of the invention, the typing is carried out after the subject has undergone treatment for the disease state or the infection with antibiotic resistant E. coli, and the typing indicates efficacy of the treatment. In other embodiments of the invention, the biological sample, for example, is urine, blood, wound, tissue, saliva, sputum, feces, spinal fluid, plasma, peritoneal fluid, ascites, pleural fluid, joint fluid, abscess material, pus, tracheal secretions, bile, exudate, corneal scraping, bone, drainage and biopsy material. In one embodiment, the biological sample is urine.

[0009] In one embodiment, the portion of the fimH gene is amplified by an oligonucleotide primer pair consisting of 5′-CACTCAGGGAACCATTCAGGCA-3′ (SEQ ID NO: 01) and 5′-CTTATTGATAAACAAAAGTCAC-3′ (SEQ ID NO: 02). In another embodiment, the portion of the fumC gene is amplified by an oligonucleotide primer pair that amplifies an 500 nucleotide fragment or less of fumC.

[0010] In a second aspect, the invention provides a composition consisting of between 2-5 oligonucleotide primer pairs, wherein: (a) a first primer pair selectively amplifies a region of a fimH gene; and (b) a second primer pair selectively amplifies a region of a gene selected from the group consisting of fumC, adk, gyrB, icd, mdh, purA, and recA. In some embodiments of the second aspect of the invention, the first primer pair consists of SEQ ID NO: 01 and SEQ ID NO: 02.

### BRIEF DESCRIPTION OF THE DRAWINGS

[0011] The disclosed exemplary aspects have other advantages and features which will be more readily apparent from the detailed description, the appended claims, and the accompanying figures. A brief description of the figures is below.

[0012] FIG. 1 shows a sequence-based typing of a collection of 191 model E. coli isolates. (Left panel) Dendrogram of concatenated 7-locus MLST sequences. (Right panel) Dendrogram of full-length type 1 fimbrial adhesin gene fimH sequences, with fimH typing region (fimHTR) alleles and amino acid polymorphisms differed from the consensus structure. Cross-connecting lines link same-strain MLST and fimH haplotypes. The scales at the bottoms of dendrograms indicate phylogenetic distance expressed as percent identity at the nucleotide level. ST numbering is according to the MLST database (on the World Wide Web mlst.uccle/mlst/dbs/Ecoli). The number of isolates associated with the specified type (in parentheses) is shown only where that number is >1. Empty circles indicate STs that include a fimH-null strain. Colors of cross-connecting lines between dendrograms correspond to the colors of the phylogenetic group origins: red, group B2 only; blue, group B1 only; orange, group A only; green, group D only; black, two or more phylogenetic groups. FimH hot spot polymorphisms are underlined. Mature FimH peptide polymorphisms encoded outside the typing region are italicized.

[0013] FIG. 2 shows a sliding-window nucleotide polymorphism plot of 7 MLST loci, as well as the fimH lectin and pilin domains. The signal peptide and two fimH domains (lectin and pilin) are partitioned by a vertical dashed line. The red bold fimH typing region (fimHTR) includes the entire fimH lectin domain and small portions of the adjacent regions (i.e., signal peptide to the left, pilin domain to the right). Overlapping windows of 100 nt with a step size of 50 nt were used. The average n value(±the standard error) is shown for each locus

[0014] FIG. 3 shows a distribution of isolates and unique profiles by group size among 853 current E. coli strains. ST (FIG. 3A) or CHT (FIG. 3B) sizes: <0.5%, small; 0.5 to 5%, medium; >5%, large. Light bars, total number of strains in each category (left axis). Dark bars, total number of unique profiles in each category (right axis). The axis scale is the same in both panels.

[0015] FIG. 4 shows correspondence of fumC-fimH profiles (CHTs) with STs for the 5 largest ST complexes. Dotted lines connect minor STs with the corresponding CHTs; the remaining CHTs correspond to the predominant ST within the complex. CHT circles without a pie slice represent profiles with a total match to the ST complex; circles with a pie slice represent CHTs that mostly (93 to 97%) match the ST complex (the slice symbolizes the “nonmatch” isolates).

[0016] FIG. 5 shows the distribution of isolates by clonotype at different laboratories. The outer ring shows the distribution of clonotypes among isolates from all locations combined (Total), in the order of overall clonotype prevalence. The inner rings show the distribution of clonotypes within individual laboratories, sorted within each ring according to local clonotype prevalence. Clonotypes accounting for >1% of the total collection are shade coded consistently across sites.

[0017] FIG. 6 shows the antimicrobial resistance profiles within the total collection. Cumulative resistance profiles of individual major CH clonotypes (those with greater than or equal to 1% of isolates) are shown, as well as all other clonotypes combined (37% of isolates), and the total population (Total). The size (number of isolates) of each major clonotype is shown at the lower right. Resistance prevalence value significantly higher (OR greater than or equal to 2) or lower (OR less than or equal to 0.5) than the mean for the rest of the population at the P<0.05 level are marked in dark gray or asterisk (*), respectively.

[0018] FIG. 7 shows the association of recurrence or sepsis with major CH clonotypes. Clonotypes are shown in order of overall resistance prevalence, as in FIG. 2. The drug-bug mismatch bar demonstrates the association of recurrence or sepsis with resistance to the prescribed antimicrobial. Significantly increased (*) or decreased (**) recurrence and/or sepsis in a particular CH clonotype with a P value of <0.05; significantly increased (+) or decreased (++) recurrence and/or sepsis in a particular CH clonotype with a P value of <0.10.

[0019] FIG. 8 shows CH clonotyping of E. coli in patients' urine samples. (A) Detection of CH40-30 clones in urine samples using quantitative polymerase chain reaction (qPCR) with RMTS1 gene-specific probe. (B) Detection of CH40-30 clones in urine samples using qPCR with fimH SNP-specific probe. Determination of three different CH clonotypes ((C) CH40-30; (D) CH35-27; and (E) CH24-10) in urine samples using pyrosequencing of fumC and fimH regions on PyroMark Q24.

[0020] FIG. 9 shows across laboratory comparisons of cumulative antimicrobial profiles for 10 major CH clonotypes. Clonotypes with increased (OR greater than or equal to 2.0) or decreased (OR less than or equal to 0.5) resistance prevalence relative to the rest of the population are shown in dark gray and asterisk (*), respectively (at the P<0.10 level, due to the relatively low number of isolates). Y axis shows the prevalence of resistance to each antimicrobial. Ch=Children's Hospital (Seattle); GH=Group Health Cooperative (Seattle); UW=University of Washington Medical Center (Seattle); HV=Harborview Medical Center (Seattle); and VA=VA Medical Center (Minneapolis).

### DETAILED DESCRIPTION OF THE INVENTION

[0021] All references cited are herein incorporated by reference in their entirety. Within this application, unless otherwise stated, the techniques utilized may be found in any of several well-known references such as: Molecular Cloning: A Laboratory Manual (Sambrook, et al., 1989, Cold Spring Harbor Laboratory Press), Gene Expression Technology (Methods in Enzymology, Vol. 185, edited by D. Goeddel, 1991. Academic Press, San Diego, Calif.), “Guide to Protein Purification” in Methods in Enzymology (M.P. Deutshcer, ed., (1990) Academic Press, Inc.); PCR Protocols: A Guide to Methods and Applications (Innis, et al. 1990. Academic Press, San Diego, Calif.), Culture of Animal Cells: A Manual of Basic Technique, 2nd Ed. (R. I. Freshney. 1987. Liss, Inc. New York, N.Y.), Gene Transfer and Expression Protocols, pp. 109-128, ed. E. J. Murray, The Humana Press Inc., Clifton, N.J.), and the Ambion 1998 Catalog (Ambion, Austin, Tex.).

[0022] Terms used in the claims and specification are defined as set forth below unless otherwise specified. In the case of direct conflict with a term used in a parent provisional patent application, the term used in the instant specification shall control.

[0023] The particulars shown herein are by way of example and for purposes of illustrative discussion of the preferred embodiments of the present invention only and are presented in the cause of providing what is believed to be the most useful and readily understood description of the principles and conceptual aspects of various embodiments of the invention. In this regard, no attempt is made to show structural details of the invention in more detail than is necessary for the fundamental understanding of the invention, the description taken with the drawings and/or examples making apparent to those skilled in the art how the several forms of the invention may be embodied in practice.

[0024] The following definitions and explanations are meant and intended to be controlling in any future construction unless clearly and unambiguously modified in the following examples or when application of the meaning renders any construction meaningless or essentially meaningless. In cases where the construction of the term would render it meaningless or essentially meaningless, the definition should be taken from Webster's Dictionary, 3rd Edition or a dictionary known to those of skill in the art, such as the Oxford Dictionary of Biochemistry and Molecular Biology (Ed. Anthony Smith, Oxford University Press, Oxford, 2004).

[0025] As used herein, the singular forms “a”, “an” and “the” include plural referents unless the context clearly dictates otherwise. “And” as used herein is interchangeably used with “or” unless expressly stated otherwise.

[0026] All embodiments disclosed herein can be used in combination unless the context clearly dictates otherwise.

[0027] In a first aspect, the present invention provides a method of typing Escherichia coli in a sample comprising: (a) determining a nucleic acid sequence in the sample of Escherichia coli (E. coli) type 1 fimbrial adhesion (fimH) gene and a further E. coli gene selected from the group consisting of: fumC, adk, gyrB, icd, mdh, purA, and recA to identify a clonotype of the sample; and (b) typing E. coli present in the sample based on the clonotype.

[0028] The inventors have surprisingly discovered that methods of the present invention provide the clonal identities of clinical E. coli isolates, which are linked to distinct antimicrobial susceptibility profiles and clinical manifestations. These findings indicate that a clonotype-guided approach substantially reduces the likelihood of treating an E. coli infection with an ineffective antimicrobial agent (a drug-bug mismatch) during the course of initial antimicrobial therapy by providing more specific data about a patient's actual infectious organism. Furthermore, the methods of the invention provide greater certainty regarding which antimicrobials can and cannot be used reliably for a given subject with suspected E. coli infection, and will thus be of great benefit to patients and health care systems alike.

[0029] In other embodiments of the invention, the methods of the invention may be used as a rapid sequence typing scheme for E. coli that preserves the phylogenetic signal (defined herein as the statistical non-independence among species trait values due to their phylogenetic relatedness), has superior discriminatory power compared to standard 7-locus MLST, and resolves clinically important sub-lineages within sequence types (for example, the clonotype designated CH40-30 is a sublineage of sequence type ST131; see FIG. 6 and the examples that follow). It therefore can serve as a cost-effective alternative to the two most-commonly used clonal typing methods for E. coli, (i) standard multilocus sequence typing (MLST) of 5-8 housekeeping loci and (ii) pulsed-field gel electrophoresis (PFGE), which are poorly suited for associating genetic lineages with susceptibility profiles in clinical practice due to their high costs, slow turnaround times, and/or unsuitably low (for MLST) or variable (for PFGE) levels of discrimination. The clonotyping of the invention is applicable as a molecular tool for both applied and basic investigations regarding the epidemiology and population structure of E. coli.

[0030] The type 1 fimbrial adhesin (fimH) gene is involved in regulation of length and mediation of adhesion of type 1 fimbriae (but not necessary for the production of fimbriae). An exemplary sequence for fimH, includes, but is not limited to that of Escherichia coli strain ECOR63 type 1 fimbrial adhesin (fimH) gene, corresponding to GenBank: FJ865645.1: gi|268638760|gb|FJ865645.1|Escherichia coli strain ECOR63 type 1 fimbrial adhesin (fimH) gene (SEQ ID NO: 04):

ATGAAACGAGTTATTACCCTGTTTGCTGTACTGCTGATGGGCTGGTCGG
TAAATGCCTGGTCATTCGCCTGTAAAACCGCCAATGGTACTGCTATCCC
TATTGGCGGTGGCAGCGCCAATGTTTATGTAAACCTTGCGCCTGCCGTG
AATGTGGGGCAAAACCTGGTCGTGGATCTTTCGACGCAAATCTTTTGCC
ATAACGATTACCCGGAAACCATTACAGACTATGTCACACTGCAACGAGG
TTCGGCTTATGGCGGCGTGTTATCTAGTTTTTCCGGGACCGTAAAATAT
AATGGCAGTAGCTATCCTTTCCCTACTACCAGCGAAACGCCGCGGGTTG
TTTATAATTCGAGAACGGATAAGCCGTGGCCGGTGGCGCTTTATTTGAC
GCCTGTGAGCAGTGCTGGCGGGGTGGCGATTAAAGCTGGTTCATTAATT
GCCGTGCTTATTTTGCGACAGACCAACAACTATAACAGCGATGATTTTC
AGTTTGTGTGGAATATTTACGCCAATAATGATGTGGTGGTGCCCACTGG
CGGCTGTGATGTTTCTGCTCGTGATGTCACCGTTACTCTGCCGGACTAC
CCTGGTTCAGTGCCGATTCCTCTTACCGTTTATTGTGCGAAAAGCCAAA
ACCTGGGGTATTACCTCTCCGGCACAACCGCAGATGCGGGCAACTCGAT
TTTCACCAATACCGCGTCGTTTTCACCCGCGCAGGGCGTCGGCGTACAG
TTGACGCGCAACGGTACGATTATTCCAGCGAATAACACGGTATCGTTAG
GAGCAGTAGGGACTTCGGCGGTAAGTCTGGGATTAACGGCAAATTACGC
ACGTACCGGAGGGCAGGTGACTGCAGGGAATGTGCAATCGATTATTGGC
GTGACTTTTGTTTATCAA.

[0031] The fumarase C (fumC) gene is involved in catalysis of the reversible addition of water to fumarate to give L-malate. An exemplary sequence for fumC, includes, but is not limited to that of Escherichia coli ECOR70 fumarase C (fumC) gene, GenBank: AY464329.1; gi|39754439|gb|AY464329.1|Escherichia coli strain ECOR70 fumarase C (fumC) gene, SEQ ID NO: 05:

CGAGCGCCATTCGGCAGGCGGCGGATGAAGTACTGGCAGGACAGCATG
ACGACGAATTCCCGCTGGCTATCTGGCAGACCGGCTCCGGCACGCAAA
GTAACATGAACATGAACGAAGTGCTGGCTAACCGGGCCAGTGAATTAC
TCGGCGGCGTGCGCGGGATGGAACGTAAAGTTCACCCTAACGACGACG
TGAACAAAAGCCAAAGTTCCAACGATGTCTTTCCGACGGCGATGCACG
TTGCGGCGCTGCTGGCGCTGCGCAAGCAACTCATTCCGCAGCTTAAAA
CCCTGACACAGACACTGAGTGAAAAATCGCGTGCATTTGCCGATATCG
TCAAAATCGGTCGAACCCACTTGCAGGACGCCACGCCGCTAACACTAG
GGCAGGAGATTTCCGGCTGGGTAGCGATGCTCGAGCATAATCTCAAAC
ATATCGAATACAGCCTGCCTCACGTAGCGGAACTGGC.

[0032] The adenylate kinase (adk) gene is involved in catalysis of the reversible transfer of the terminal phosphate group between ATP and AMP. Adenylate kinase also plays an important role in cellular energy homeostasis and in adenine nucleotide metabolism. An exemplary sequence for adk, includes, but is not limited to that of Escherichia coli strain ECOR70 adenylate kinase (adk) gene, GenBank: AY464327.1; gi|39754301|gb|AY464327.1|Escherichia coli strain ECOR70 adenylate kinase (adk) gene (SEQ ID NO: 06):

GGGGAAAGGGACTCAGGCTCAGTTCATCATGGAGAAATATGGTATTCCG
CAAATCTCCACTGGCGATATGCTGCGTGCTGCGGTCAAATCTGGCTCCG
AGCTGGGTAAACAAGCAAAAGACATTATGGATGCTGGCAAACTGGTCAC
CGACGAACTGGTGATCGCGCTGGTTAAAGAGCGCATTGCTCAGGAAGAC
TGCCGTAATGGTTTCCTGTTGGACGGCTTCCCGCGTACCATTCCGCAGG
CAGACGCGATGAAAGAAGCGGGCATCAATGTTGATTACGTTCTGGAATT
CGACGTACCGGACGAACTGATTGTTGATCGTATCGTAGGCCGCCGCGTT
CATGCGCCGTCTGGTCGTGTTTATCACGTTAAATTCAATCCGCCGAAAG
TAGAAGGCAAAGACGACGTTACCGGTGAAGAACTGACTACCCGTAAAGA
CGATCAGGAAGAAACCGTGCGTAAACGTCTGGTTGAATACCATCAGATG
ACTGCACCGCTGATCGGCTACTACTCCAAAGAAGCGGAAGCGGGTA.

[0033] The DNA gyrase subunit B (gyrB) gene belongs to the type II topoisomerase family. An exemplary sequence for gyrB, includes, but is not limited to that of Escherichia coli strain UPEC_{—}156 DNA gyrase B (gyrB) gene, GenBank: JF893048.1; gi|336044839|gb|JF893048.1|Escherichia coli strain UPEC_{—}156 DNA gyrase B (gyrB) gene (SEQ ID NO: 07):

ATGACCGTTCTGCACGCAGGCGGTAAATTTGACGATAACTCCTATAAA
GTGTCCGGCGGTCTGCACGGCGTTGGTGTTTCGGTAGTAAACGCCCTG
TCGCAAAAACTGGAGCTGGTTATCCAGCGCGAGGGTAAAATTCACCGT
CAGATCTACGAACACGGTGTACCGCAGGCTCCGCTGGCGGTTACCGGC
GAGACTGAAAAAACCGGCACCATGGTGCGTTTCTGGCCCAGCCTCGAA
ACCTTCACCAATGTGACCGAGTTCGAATATGAAATTCTGGCGAAACGT
CTGCGTGAGTTGTCGTTCCTCAACTCCGGCGTTTCCATTCGTTTGCGC
GACAAGCGTGACGGCAAAGAAGACCACTTCCACTATGAAGGCGGCATC
AAGGCGTTCGTTGAATATCTGAACAAGAACAAAACGCCGATCCATCCG
AATATCTTCTACTTCTCCACCGAAAAAGACGGTATTGGCGTCGAAGTG
GCGTTGCAGTGGAACGATGGCTTCCAGGAAAACATCTACTGC.

[0034] The isocitrate dehydrogenase (icd) gene is an enzyme that catalyzes the oxidative decarboxylation of isocitrate, producing alpha-ketoglutarate (α-ketoglutarate) and CO₂. An exemplary sequence for icd, includes, but is not limited to that of Escherichia coli strain ECOR27 isocitrate dehydrogenase (icd) gene, GenBank: AY132834.1; gi|33383656|gb|AY132834.1|Escherichia coli strain ECOR27 isocitrate dehydrogenase (icd) gene (SEQ ID NO: 08):

ACCCTGCAAAACGGCAAACTCAACGTTCCTGAAAATCCGATTATCCCT
TACATTGAAGGTGATGGAATCGGTGTAGATGTAACCCCAGCCATGCTG
AAAGTGGTCGACGCTGCAGTCGAGAAAGCCTATAAAGGCGAGCGTAAA
ATCTCCTGGATGGAAATTTACACCGGTGAAAAATCCACACAGGTTTAT
GGTCAGGATGTCTGGCTGCCTGCTGAAACCCTTGATCTGATTCGTGAA
TATCGCGTTGCCATTAAAGGTCCGCTGACCACTCCTGTTGGTGGCGGT
ATTCGCTCTCTGAACGTTGCCCTGCGCCAGGAACTGGATCTCTACATC
TGCCTGCGTCCGGTACGTTACTATCAGGGCACTCCAAGCCCGGTTAAA
CACCCTGAACTGACCGATATGGTTATCTTCCGTGAAAACTCGGAAGAC
ATTTATGCGGGTATCGAATGGAAAGCAGACTCTGCCGACGCCGAGAAA
GTGATTAAATTCCTGCGTGAAGAGATGGGGGTGAAGAAAATTCGCTTC
CCGGAACATTGTGGTATCGGTATTAAGCCGTGTTCGGAAGAAGGCACC
AAACGTCTGGTTCGTGCAGCGATCGAATACGCAATTGCTAACGATCGT
GACTCTGTGACTCTGGTGCACAAAGGCAACATCATGAAGTTCACCGAA
GGCGCGTTTAAAGACTGGGGCTACCAGCTGGCGCGTGAAGAGTTTGGC
GGTGAACTGATCGACGGCGGCCCGTGGCTGAAAGTTAAAAACCCGAAC
ACCGGCAAAGAGATCGTCATTAAAGACGTGATTGCTGATGCATTCCTG
CAACAAATCCTGCTGCGTCCGGCTGAATATGATGTTATCGCCTGTATG
AACCTGAACGGTGACTACATTTCTGACGCTCTGGCAGCGCAGGTTGGC
GGTATCGGTATCGCCCCTGGAGCAAACATCGGTGACGAATGCGCCCTG
TTTGAAGCCACCCCCGGTACTGCGCCGAAATACGCCGGTCAGGACAAA
GTAAACCCTGGCTCTATTATTCTCTCCGCTGAGATGATGTTACGCCAT
ATGGGTTGGACTGAAGCGGCTGACCTGATTGTTAAAGGTATGGAAGGC
GCAATCAATGCCAAGACCGTAACCTATGACTTCGAACGTCTGATGGAA
GGCGCTAAACTGCT.

[0035] The malate dehydrogenase (mdh) gene is an enzyme that reversibly catalyzes the oxidation of malate to oxaloacetate using the reduction of NAD+ to NADH. An exemplary sequence for mdh, includes, but is not limited to that of Escherichia coli strain DFS179 NAD(P)-binding malate dehydrogenase (mdh) gene, GenBank: HM221406.1; gi|297497101|gb|HM221406.1|Escherichia coli strain DFS179 NAD(P)-binding malate dehydrogenase (mdh) gene (SEQ ID NO: 09):

GGTGAAGATGCGACTCCGGCGCTGGAAGGCGCAGATGTCGTTCTTATC
TCTGCAGGTGTAGCGCGTAAACCGGGTATGGATCGTTCCGACCTGTTT
AACGTTAACGCCGGCATCGTGAAAAACCTGGTACAGCAAGTTGCGAAA
ACCTGCCCGAAAGCGTGCATTGGTATTATCACTAACCCGGTTAACACC
ACAGTTGCAATTGCTGCTGAAGTGCTGAAAAAAGCCGGTGTTTATGAC
AAAAACAAACTGTTCGGCGTTACCACGCTGGATATCATTCGTTCCAAC
ACCTTTGTTGCGGAACTGAAAGGCAAACAGCCAGGCGAAGTTGAAGTG
CCGGTTATTGGCGGTCACTCTGGTGTTACCATTCTGCCGCTGCTGTCA
CAGGTTCCTGGCGTTAGTTTTACCGAGCAGGAAGTGGCTGATCTGACC
AAACGTATCCAGAACGCGGGTACTGAGGTGGTTGAAGCGAAAGCCGGT
GGCGGGTCTGCAACCCTGTCTATGGGCCAGGCAGCTGCACGTTTTGGT
CTGTCTCTGGTTCGTGCACTG.

[0036] The adenylosuccinate synthetase (purA) gene is an enzyme that plays an important role in purine biosynthesis, by catalysing the guanosine triphosphate (GTP)-dependent conversion of inosine monophosphate (IMP) and aspartic acid to guanosine diphosphate (GDP), phosphate and N(6)-(1,2-dicarboxyethyl)-AMP. An exemplary sequence for purA, includes, but is not limited to that of Escherichia coli strain APEC_{—}173 adenylosuccinate synthetase (purA) gene, GenBank: JF892777.1; gi|335328288|gb|JF892777.1|Escherichia coli strain APEC_{—}173 adenylosuccinate synthetase (purA) gene (SEQ ID NO: 10):

TCCGAAGCATGTCCGCTGATCCTTGATTATCACGTTGCGCTGGATAACGC
GCGTGAGAAAGCGCGTGGCGCGAAAGCGATCGGCACCACCGGTCGTGGTA
TCGGGCCTGCTTATGAAGATAAAGTGGCACGTCGCGGTCTGCGTGTTGGC
GACCTTTTCGACAAAGAAACCTTCGCTGAAAAACTGAAAGAAGTGATGGA
ATATCACAACTTCCAGTTGGTTAACTACTACAAAGCTGAAGCGGTTGATT
ACCAGAAAGTTCTGGATGATACGATGGCTGTTGCCGACATCCTGACTTCT
ATGGTGGTTGACGTTTCTGACCTGCTCGACCAGGCGCGTCAGCGTGGCGA
TTTCGTCATGTTTGAAGGTGCGCAGGGTACGCTGCTGGATATCGACCACG
GTACTTATCCGTACGTAACTTCTTCCAACACCACTGCTGGTGGCGTGGCG
ACCGGTTCCGGCCTGGGCCCGCGTTATGTTGATTACGTTCTGGGTATCCT
CAAAGCTTACTCCACTCGTGTGGGTGCAGGTCCGTTCCCGACTGAACTGT
TTGATGAAACTGGCGAGTTCCTCTGCAAGCAGGGTAACGAATTCGGCGCA
ACTACGGGTCGTCGTCGTCGTACCGGCTGGCTGGACAC.

[0037] The RecA protein (recA) gene is a 38 kilodalton protein essential for the repair and maintenance of DNA. An exemplary sequence for recA, includes, but is not limited to that of Escherichia coli strain ECOR70 RecA protein (recA) gene, GenBank: AY464332.1; gi|39754649|gb|AY464332.1|Escherichia coli strain ECOR70RecA protein (recA) gene (SEQ ID NO: 11):

CGCACGTAAACTGGGCGTCGATATCGATAACCTGCTGTGCTCCCAGCCG
GACACCGGCGAGCAGGCACTGGAAATCTGTGACGCCCTGGCGCGTTCTG
GCGCAGTAGACGTTATCGTCGTTGACTCCGTGGCGGCACTGACGCCGAA
AGCGGAAATCGAAGGCGAAATCGGCGACTCTCACATGGGCCTTGCGGCA
CGTATGATGAGCCAGGCGATGCGTAAGCTGGCGGGTAACCTGAAGCAGT
CCAACACGCTGCTGATCTTCATCAACCAGATCCGTATGAAAATTGGTGT
GATGTTCGGTAACCCGGAAACCACTACCGGTGGTAACGCGCTGAAATTC
TACGCCTCTGTTCGTCTCGACATCCGTCGTATCGGCGCGGTGAAAGAGG
GCGAAAACGTGGTGGGTAGCGAAACCCGCGTGAAAGTGGTGAAGAACAA
AATCGCTGCACCGTTTAAACAGGCTGAATTTCAGATCCTCTACGGCGAA
GGTATCAACTTCTACGGCGA.

[0038] The vast majority of E. coli strains encode type 1 fimbriae. The fim cluster is located in a highly recombinogenic region on the E. coli chromosome, just downstream of the leuX tRNA locus, into which pathogenicity islands are frequently inserted. The fimH gene, encoding the type 1 fimbrial adhesin, is under positive selection for functional mutations, whereby single nucleotide polymorphisms (SNPs) can produce amino acid replacements that dramatically alter bacterial cell adhesion properties relevant to pathogenesis.

[0039] As used herein, the term “clonotype” refers to a clonal group or subspecies of genetically related E. coli lineages based on the nucleotide sequences of the fimH loci and at least one other E. coli gene loci. The inventors have discovered the use of a clonotype (i.e. clonotyping) based on the fimH sequence and at least one other E. coli gene loci as a predictive marker for antimicrobial susceptibility, and that the clonotyping methods of the invention are superior to the two most-commonly used sequence typing methods for E. coli, standard multilocus sequence typing of 5-8 housekeeping loci (MLST) and pulsed-field gel electrophoresis (PFGE), which are poorly suited for associating genetic lineages with susceptibility profiles in clinical practice due to their high costs, slow turnaround times, and/or unsuitably low (for MLST) or variable (for PFGE) levels of discrimination.

[0040] Any suitable sample can be used in which E. coli may be present and from which it would be useful to identify the subspecies of E. coli present. In various non-limiting embodiments, the sample may be an environmental sample (e.g., water, seawater, soil, food or food item, agricultural, surface swab, medical supplies or devices), a clinical sample or a biological sample (e.g., blood, plasma, serum, lymph node, gastrointestinal tissue, urine, exudates, other body fluids, or any other plant or animal tissue), any microbial culture or any microbial colony. In one embodiment of the invention, the sample is a biological sample. Biological examples include, but are not limited to urine, blood, wound, tissue, saliva, sputum, feces, spinal fluid, plasma, peritoneal fluid, ascites, pleural fluid, joint fluid, abscess material, pus, tracheal secretions, bile, exudate, corneal scraping, bone, drainage, lymph fluid, and biopsy material. In one embodiment, the biological sample is urine.

[0041] In some embodiments, the sample is a biological sample from a subject, and the typing indicates presence of antibiotic resistant E. coli in the subject, or is used to diagnose or prognose a disease state in the subject. In one embodiment, the methods of the invention comprise diagnosing whether a sample contains an antibiotic resistant strain of E. coli. As used herein, “antibiotic resistant” or “antibiotic resistance” indicates a sub-population or subspecies or clonal group of E. coli, that are able to survive after exposure to one or more antibiotics, antibiotic treatments or therapies or antimicrobials. Antibiotic resistance is a serious and growing phenomenon in contemporary medicine and has emerged as one of the pre-eminent public health concerns of the 21st century.

[0042] The term “subject” or “patient” as used herein includes both humans and non-humans and include, but is not limited to humans, non-human primates, canines, felines, murines, bovines, equines, and porcines.

[0043] In some embodiments, the typing indicates that the subject is infected with antibiotic resistant E. coli; and/or the subject has or is at risk of having a urinary tract infection or sepsis, and the typing is used to diagnose and/or prognose a urinary tract infection or sepsis in the subject. For example, the CH40-30, CH4-27, CH11-54, CH13-5, CH40-22 and CH35-27 clonotypes are extensively resistant to certain antimicrobials (e.g. resistant to AMP, TET, A/S, T/S, A/K, CEF or CIP), while the CH38-41, CH38-15, CH52-14, CH24-9 and CH14-2 clonotypes are extensively susceptible to certain antimicrobials (e.g. sensitive to AMP, TET, A/S, T/S, A/K, CEF or CIP) (also see FIG. 6). Additionally, the CH40-30, CH14-2 and CH4-27 clonotypes were significantly overrepresented among patients with persistent or recurrent UTIs or sepsis (see FIG. 7), while the CH38-41, CH13-5, CH38-15 and CH24-10 clonotypes were less likely to associate with UTI persistence or recurrence of infection. For example, for a UTI patient identified to be infected with the CH40-30 clonotype the prognosis would be likely that the patient will have recurrence of the UTI. In another example, a patient who is identified to be infected with the CH14-2 clonotype the prognosis would be likely that the patient develop sepsis.

[0044] In another embodiment, diagnosing a UTI may also comprise identifying the clonotype (e.g. CH40-30, CH4-27, CH11-54, CH13-5, CH40-22, CH35-27, CH38-41, CH38-15, CH52-14, CH24-9, CH14-2 or any of the clonotypes identified in Table A below) from the biological sample of the subject. Additional methods may comprise detecting one or more clonotypes in a patient being treated for UTI, where you can compare the presence of one or more clonal subspecies from a patient or subject being treated for UTI to a control (for example, a control may be the presence of the clonal subspecies in the patient or subject at baseline before treatment or the absence of the clonal subspecies in a patient or subject not suspected of having a UTI).

[0045] In another embodiment, diagnosing sepsis may also comprise identifying the clonotype (e.g. CH40-30, CH4-27, CH11-54, CH13-5, CH40-22, CH35-27, CH38-41, CH38-15, CH52-14, CH24-9, CH14-2 or any of the clonotypes identified in Table A below) from the biological sample of the subject. Additional methods may comprise detecting one or more clonotypes in a patient being treated for sepsis, where you can compare the presence of one or more clonal subspecies from a patient or subject being treated for sepsis to a control (for example, a control may be the presence of the clonal subspecies in the patient or subject at baseline before treatment or the absence of the clonal subspecies in a patient or subject not suspected of having sepsis).

[0046] In a further embodiment, the methods of the invention may be used for treating a patient or subject, wherein the methods may further comprise carrying out a clinical step based on the clonotype. In such an example, if the identified clonotype is predicted to have susceptibility to a specific antibiotic treatment, then methods may further comprise administering the antibiotic treatment to the patient or subject. However, if the identified clonotype is predicted to have resistance to a specific antibiotic treatment, then methods may further comprise rejecting administration of the antibiotic treatment to the patient or subject. In a non-limiting example, if the CH40-30 clonotype is identified in a biological sample from a patient, then treating that patient with ampicillin would be rejected by a clinician, while treating that patient with nitrofurantoin would be allowed. In another non-limiting example, if the CH38-15 clonotype is identified in a biological sample from a patient, then treating that patient with ampicillin would be allowed by a clinician. In such methods of treating a patient, the patient may be: (i) suspected of having, (ii) previously diagnosed with, or (iii) currently being treated for; a UTI, sepsis or any infection with an antibiotic resistant E. coli.

[0047] In a yet further embodiment, the methods of the invention may be used for treating a patient or subject, wherein the method may further comprise:

[0048] (a) determining a clonotype from a sample of a subject or patient;

[0049] (b) providing an indication that the clonotype is:
[0050] (i) resistant to an antibiotic agent when the clonotype indicates that less than 80% of the isolates in that clonotype are susceptible to that antibiotic agent; or
[0051] (ii) susceptible to an antibiotic agent when the clonotype indicates that greater than or equal to 80% of the isolates in that clonotype are susceptible to that antibiotic agent; and

[0052] (c) rejecting treatment with the antibiotic agent if the clonotype indicates it is resistant to that antibiotic agent, or

[0053] (d) allowing treatment with the antibiotic agent if the clonotype indicates is susceptible to that antibiotic agent. In a non-limiting example, if it is determined that a subject or patient is infected with the CH40-30 clonotype, then treating that patient with ampicillin would be rejected by a clinician. In another non-limiting example, if it is determined that a subject or patient is infected with the CH38-15 clonotype, then treating that patient with ampicillin would be allowed by a clinician.

TABLE A
Clonotypes and sequences of 19 major CH clonotypes (also see FIGS. 6-7)

| CH clonotype | fimH and fumC sequences of CH clonotypes |
|---|---|
| CH40-30 | fumC_allele 40 (SEQ ID NO: 12) |
| | CGAGCGCCATTCGGCAGGCGGCGGATGAAGTACTGGCAGGACAGCATGACGACGAA |
| | TTCCCGCTGGCTATCTGGCAGACCGGCTCCGGCACGCAAAGTAACATGAATATGAA |
| | CGAAGTGCTGGCTAACCGGGCCAGTGAATTACTCGGTGGCGTGCGCGGGATGGAAC |
| | GTAAAGTTCACCCTAACGACGACGTGAACAAAAGCCAAAGTTCCAACGATGTCTTT |
| | CCGACGGCGATGCACGTTGCGGCACTACTGGCGCTGCGCAAGCAACTCATTCCACA |
| | ACTTAAAACCCTGACCCAGACGCTGAGTGAAAAATCCCGCGCATTTGCTGATATCG |
| | TCAAAATCGGTCGTACCCACTTGCAGGACGCCACGCCGTTAACGCTGGGGCAGGAG |
| | ATTTCCGGCTGGGTAGCGATGCTGGAGCATAATCTCAAACATATCGAATACAGCCT |
| | GCCTCACGTAGCGGAACTGGC |
| | fimH_allele 30 (SEQ ID NO: 13) |
| | TTCGCCTGTAAAACCGCCAATGGTACCGCTATTCCTATTGGCGGTGGCAGCGCTAA |
| | TGTTTATGTAAACCTTGCGCCTGCCGTGAATGTGGGGCAAAACCTGGTCGTAGATC |
| | TTTCGACGCAAATCTTTTGCCATAACGATTATCCGGAAACCATTACAGACTATGTC |
| | ACACTGCAACGAGGCTCGGCTTATGGCGGCGTGTTATCTAATTTTTCCGGGACCGT |
| | AAAATATAGTGGCAGTAGCTATCCATTTCCGACTACCAGCGAAACGCCGCGGGTTG |
| | TTTATAATTCGAGAACGGATAAGCCGTGGCCGGTGGCGCTTTATTTGACGCCTGTG |
| | AGCAGTGCGGGTGGGGTGGCGATTAAAGCTGGCTCATTAATTGCCGTGCTTATTTT |
| | GCGACAGACCAACAACTATAACAGCGATGATTTCCAGTTTGTGTGGAATATTTACG |
| | CCAATAATGATGTGGTGGTGCCTACTGGCGGCTGCGATGTT |
| CH4-27 | fumC_allele 4 (SEQ ID NO: 14) |
| | CGAGCGCCATTCGGCAGGCGGCGGATGAAGTACTGGCAGGACAGCATGACGACGAA |
| | TTCCCGCTGGCTATCTGGCAGACCGGCTCCGGCACGCAAAGTAACATGAACATGAA |
| | CGAAGTGCTGGCTAACCGGGCCAGTGAATTACTCGGCGGCGTGCGCGGGATGGAAC |
| | GTAAAGTTCACCCTAACGACGACGTGAACAAAAGCCAAAGTTCCAACGATGTCTTT |
| | CCGACGGCGATGCACGTTGCGGCGCTGCTGGCGCTGCGCAAGCAACTCATTCCGCA |
| | GCTTAAAACCCTGACACAGACACTGAGTGAAAAATCGCGTGCATTTGCCGATATCG |
| | TCAAAATCGGTCGAACCCACTTGCAGGACGCCACGCCGCTAACACTAGGGCAGGAG |
| | ATTTCCGGCTGGGTAGCGATGCTCGAGCATAATCTCAAACATATCGAATACAGCCT |
| | GCCTCACGTAGCGGAACTGGC |
| | fimH_allele 27 (SEQ ID NO: 15) |
| | TTCGCCTGTAAAACCGCCAATGGTACCGCTATCCCTATTGGCGGTGGCAGCGCCAA |
| | TGTTTATGTAAACCTTGCGCCCGTCGTGAATGTGGGGCAAAACCTGGTCGTGGATC |
| | TTTCGACGCAAATCTTTTGCCATAACGATTATCCGGAAACCATTACAGACTATGTC |
| | ACACTGCAACGAGGCTCGGCTTATGGCGGCGTGTTATCTAATTTTTCCGGGACCGT |
| | AAAATATAGTGGCAGTAGCTATCCATTTCCTACCACCAGCGAAACGCCGCGCGTTG |
| | TTTATAATTCGAGAACGGATAAGCCGTGGCCGGTGGCGCTTTATTTGACGCCTGTG |
| | AGCAGTGCGGGCGGGGTGGCGATTAAAGCTGGCTCATTAATTGCCGTGCTTATTTT |
| | GCGACAGACCAACAACTATAACAGCGATGATTTCCAGTTTGTGTGGAATATTTACG |
| | CCAATAATGATGTGGTGGTGCCTACTGGCGGCTGCGATGTT |
| CH26-5 | fumC_allele 26 (SEQ ID NO: 16) |
| | CGAGCGCCATTCGGCAGGCGGCGGATGAAGTACTGGCAGGACAGCATGACGACGAA |
| | TTCCCATTGGCTATCTGGCAGACCGGCTCCGGCACGCAAAGTAACATGAACATGAA |
| | CGAAGTGCTGGCTAACCGGGCCAGTGAATTACTCGGCGGCGTGCGTGGGATGGAGC |
| | GTAAAGTTCACCCTAACGACGACGTGAACAAAAGCCAAAGTTCTAACGATGTCTTT |
| | CCAACGGCGATGCACGTTGCGGCGCTGCTGGCGCTGCGCAAGCAACTCATTCCGCA |
| | GCTTAAAACCCTGACACAGACGCTGAGTGAAAAATCCCGTGCATTTGCCGATATCG |
| | TAAAAATCGGTCGAACCCACTTGCAGGACGCCACGCCGCTAACACTGGGGCAGGAG |
| | ATTTCCGGCTGGGTAGCGATGCTCGAGCATAATCTCAAACATATTGAATACAGCCT |
| | GCCTCACGTAGCGGAACTGGC |
| | fimH_allele5 (SEQ ID NO: 17) |
| | TTCGCCTGTAAAACCGCCAATGGTACCGCTATCCCTATTGGCGGTGGCAGCGCCAA |
| | TGTTTATGTAAACCTTGCGCCTGCCGTGAATGTGGGGCAAAACCTGGTCGTGGATC |
| | TTTCGACGCAAATCTTTTGCCATAACGATTACCCGGAAACCATTACAGACTATGTC |
| | ACACTGCAACGAGGTTCGGCTTATGGCGGCGTGTTATCTAGTTTTTCCGGGACCGT |
| | AAAATATAATGGCAGTAGCTATCCTTTCCCTACTACCAGCGAAACGCCGCGGGTTG |
| | TTTATAATTCGAGAACGGATAAGCCGTGGCCGGTGGCGCTTTATTTGACGCCTGTG |
| | AGCAGTGCGGGGGGAGTGGCGATTAAAGCAGGCTCATTAATTGCCGTGCTTATTTT |
| | GCGACAGACCAACAACTATAACAGCGATGATTTCCAGTTTGTGTGGAATATTTACG |
| | CCAATAATGATGTGGTGGTGCCCACTGGCGGCTGCGATGTT |
| CH11-54 | fumcC_allele 11 (SEQ ID NO: 18) |
| | CGAGCGCCATTCGTCAGGCGGCGGATGAAGTACTGGCAGGACAGCATGACGACGAA |
| | TTCCCGCTGGCTATCTGGCAGACCGGCTCCGGCACGCAAAGTAACATGAACATGAA |
| | CGAAGTGCTGGCTAACCGGGCCAGTGAATTACTCGGCGGTGTGCGCGGGATGGAAC |
| | GTAAAGTTCACCCTAACGACGACGTGAACAAAAGCCAAAGTTCCAACGATGTCTTT |
| | CCGACGGCGATGCACGTTGCGGCGCTGCTGGCGCTGCGCAAGCAACTCATTCCTCA |
| | GCTTAAAACCCTGACACAGACACTGAATGAGAAATCCCGTGCTTTTGCCGATATCG |
| | TCAAAATTGGTCGTACTCACTTGCAGGATGCCACGCCGTTAACGCTGGGGCAGGAG |
| | ATTTCCGGCTGGGTAGCGATGCTCGAGCATAATCTCAAACATATCGAATACAGCCT |
| | GCCTCACGTAGCGGAACTGGC |
| | fimH_allele 54 (SEQ ID NO: 19) |
| | TTCGCCTGTAAAACCGCCAATGGCACCGCTATCCCTATTGGCGGTGGCAGCGCCAA |
| | TGTTTATGTAAACCTTGCGCCCGCCGTGAATGTGGGGCAAAACCTGGTCGTGGATC |
| | TTTCGACGCAAATCTTTTGCCATAACGATTACCCGGAAACCATTACAGATTATGTC |
| | ACACTGCAACGAGGCTCGGCTTATGGCGGCGTGTTATCTAATTTTTCCGGGACCGT |
| | AAAATATAGTGGCAGTAGCTATCCATTTCCGACCACCAGTGAAACGCCGCGGGTTG |
| | TTTATAATTCGAGAACGGATAAGCCGTGGCCGGTGGCGCTTTATTTGACGCCTGTG |
| | AGCAGTGCGGGCGGGGTGGTGATTAAAGCTGGCTCATTAATTGCCGTGCTTATTTT |
| | GCGACAGACCAACAACTATAACAGCGATGATTTCCAGTTTGTGTGGAATATTTACG |
| | CCAATAATGATGTGGTGGTGCCCACTGGCGGCTGCGATGTT |
| CH40-41 | fumC_allele 40 (SEQ ID NO: 12) |
| | CGAGCGCCATTCGGCAGGCGGCGGATGAAGTACTGGCAGGACAGCATGACGACGAA |
| | TTCCCGCTGGCTATCTGGCAGACCGGCTCCGGCACGCAAAGTAACATGAATATGAA |
| | CGAAGTGCTGGCTAACCGGGCCAGTGAATTACTCGGTGGCGTGCGCGGGATGGAAC |
| | GTAAAGTTCACCCTAACGACGACGTGAACAAAAGCCAAAGTTCCAACGATGTCTTT |
| | CCGACGGCGATGCACGTTGCGGCACTACTGGCGCTGCGCAAGCAACTCATTCCACA |
| | ACTTAAAACCCTGACCCAGACGCTGAGTGAAAAATCCCGCGCATTTGCTGATATCG |
| | TCAAAATCGGTCGTACCCACTTGCAGGACGCCACGCCGTTAACGCTGGGGCAGGAG |
| | ATTTCCGGCTGGGTAGCGATGCTGGAGCATAATCTCAAACATATCGAATACAGCCT |
| | GCCTCACGTAGCGGAACTGGC |
| | fimH_allele 41 (SEQ ID NO: 20) |
| | TTCGCCTGTAAAACCGCCAATGGTACAGCTATCCCTATTGGCGGTGGCAGCGCTAA |
| | TGTTTATGTAAACCTTGCGCCCGCCGTGAATGTGGGGCAAAACCTGGTCGTAGATC |
| | TTTCGACGCAAATCTTTTGCCATAACGATTATCCGGAAACCATTACAGACTATGTC |
| | ACACTGCAACGAGGCTCGGCTTATGGCGGCGTGTTATCTAATTTTTCCGGGACCGT |
| | AAAATATAGTGGCAGTAGCTATCCATTTCCTACCACCAGCGAAACGCCGCGCGTTG |
| | TTTATAATTCGAGAACGGATAAGCCGTGGCCGGTGGCGCTTTATTTGACGCCTGTG |
| | AGCAGTGCGGGCGGGGTGGCGATTAAAGCTGGCTCATTAATTGCCGTGCTTATTTT |
| | GCGACAGACCAACAACTATAACAGCGATGATTTCCAGTTTGTGTGGAATATTTACG |
| | CCAATAATGATGTGGTGGTGCCCACTGGCGGCTGTGATGTT |
| CH35-27 | fumC_allele 35 (SEQ ID NO: 21) |
| | CGAGCGCCATTCGGCAGGCGGCGGATGAAGTACTGGCAGGACAGCATGACGACGAA |
| | TTCCCATTGGCTATCTGGCAGACTGGCTCCGGCACGCAAAGTAACATGAACATGAA |
| | CGAAGTGCTGGCTAACCGGGCCAGTGAATTACTCGGCGGCGTGCGTGGGATGGAGC |
| | GTAAAGTTCACCCTAACGACGACGTGAACAAAAGCCAAAGTTCTAACGATGTCTTT |
| | CCAACGGCGATGCACGTTGCGGCGCTGCTGGCGCTGCGCAAGCAACTCATTCCGCA |
| | GCTTAAAACCCTGACACAGACGCTGAGTGAAAAATCGCGTGCATTTGCCGATATCG |
| | TAAAAATCGGTCGAACCCACTTGCAGGACGCCACGCCGCTAACACTGGGGCAGGAG |
| | ATTTCCGGCTGGGTAGCGATGCTCGAGCATAATCTCAAACATATTGAATACAGCCT |
| | GCCTCACGTAGCGGAACTGGC |
| | fimH_allele 27 (SEQ ID NO: 15) |
| | TTCGCCTGTAAAACCGCCAATGGTACCGCTATCCCTATTGGCGGTGGCAGCGCCAA |
| | TGTTTATGTAAACCTTGCGCCCGTCGTGAATGTGGGGCAAAACCTGGTCGTGGATC |
| | TTTCGACGCAAATCTTTTGCCATAACGATTATCCGGAAACCATTACAGACTATGTC |
| | ACACTGCAACGAGGCTCGGCTTATGGCGGCGTGTTATCTAATTTTTCCGGGACCGT |
| | AAAATATAGTGGCAGTAGCTATCCATTTCCTACCACCAGCGAAACGCCGCGCGTTG |
| | TTTATAATTCGAGAACGGATAAGCCGTGGCCGGTGGCGCTTTATTTGACGCCTGTG |
| | AGCAGTGCGGGCGGGGTGGCGATTAAAGCTGGCTCATTAATTGCCGTGCTTATTTT |
| | GCGACAGACCAACAACTATAACAGCGATGATTTCCAGTTTGTGTGGAATATTTACG |
| | CCAATAATGATGTGGTGGTGCCTACTGGCGGCTGCGATGTT |
| CH13-5 | fumC_allele 13 (SEQ ID NO: 22) |
| | CGAGCGCCATTCGGCAGGCGGCGGATGAAGTACTGGCAGGACAGCATGACGACGAA |
| | TTCCCGCTGGCTATCTGGCAGACCGGCTCCGGCACGCAAAGTAACATGAACATGAA |
| | CGAAGTGTTGGCTAACCGGGCCAGTGAATTACTCGGCGGCGTGCGCGGGATGGAAC |
| | GTAAAGTTCACCCTAACGACGACGTGAACAAAAGCCAAAGTTCCAACGATGTCTTT |
| | CCGACGGCGATGCACGTTGCGGCACTACTGGCGCTGCGCAAGCAACTCATTCCACA |
| | ACTTAAAACCCTGACCCAGACGCTGAGTGAAAAATCCCGCGCATTTGCCGATATCG |
| | TCAAAATCGGTCGTACCCACTTGCAGGACGCGACGCCGTTAACACTGGGGCAGGAG |
| | ATTTCCGGCTGGGTAGCGATGCTGGAGCATAATCTCAAACATATCGAATACAGCCT |
| | GCCTCACGTAACGGAACTGGC |
| | fimH_allele5 (SEQ ID NO: 17) |
| | TTCGCCTGTAAAACCGCCAATGGTACCGCTATCCCTATTGGCGGTGGCAGCGCCAA |
| | TGTTTATGTAAACCTTGCGCCTGCCGTGAATGTGGGGCAAAACCTGGTCGTGGATC |
| | TTTCGACGCAAATCTTTTGCCATAACGATTACCCGGAAACCATTACAGACTATGTC |
| | ACACTGCAACGAGGTTCGGCTTATGGCGGCGTGTTATCTAGTTTTTCCGGGACCGT |
| | AAAATATAATGGCAGTAGCTATCCTTTCCCTACTACCAGCGAAACGCCGCGGGTTG |
| | TTTATAATTCGAGAACGGATAAGCCGTGGCCGGTGGCGCTTTATTTGACGCCTGTG |
| | AGCAGTGCGGGGGGAGTGGCGATTAAAGCAGGCTCATTAATTGCCGTGCTTATTTT |
| | GCGACAGACCAACAACTATAACAGCGATGATTTCCAGTTTGTGTGGAATATTTACG |
| | CCAATAATGATGTGGTGGTGCCCACTGGCGGCTGCGATGTT |
| CH24-10 | fumC_allele 24 (SEQ ID NO: 23) |
| | CGAGCGCCATTCGGCAGGCGGCGGATGAAGTACTGGCAGGACAGCATGACGACGAA |
| | TTCCCGTTGGCTATCTGGCAGACCGGCTCCGGCACGCAAAGTAACATGAACATGAA |
| | CGAAGTGCTGGCTAACCGGGCCAGTGAATTACTCGGCGGCGTGCGCGGGATGGAAC |
| | GTAAAGTTCACCCTAACGACGACGTGAACAAAAGCCAAAGTTCCAACGATGTCTTT |
| | CCGACGGCGATGCACGTTGCGGCGCTGCTGGCGCTGCGCAAGCAACTCATTCCACA |
| | ACTTAAAACCCTGACCCAGACGCTGAGTGAAAAATCCCGCGCATTTGCCGATATCG |
| | TCAAAATCGGTCGTACCCACTTGCAGGACGCCACGCCGTTAACGCTGGGGCAGGAG |
| | ATTTCCGGCTGGGTAGCGATGCTGGAGCATAATCTCAAACATATCGAATACAGCCT |
| | GCCTCACGTAGCGGAACTGGC |
| | fimH_allele 10 (SEQ ID NO: 24) |
| | TTCGCCTGTAAAACCGCCAATGGTACCGCAATCCCTATTGGCGGTGGCAGCGCCAA |
| | TGTTTATGTAAACCTTGCGCCTGCCGTGAATGTGGGGCAAAACCTGGTCGTAGATC |
| | TTTCGACGCAAATCTTTTGCCATAACGATTACCCAGAAACCATTACAGACTATGTC |
| | ACACTGCAACGAGGTTCGGCTTATGGCGGCGTGTTATCTAGTTTTTCCGGGACCGT |
| | AAAATATAATGGCAGTAGCTATCCTTTCCCTACTACCAGCGAAACGCCGCGGGTTG |
| | TTTATAATTCGAGAACGGATAAGCCGTGGCCGGTGGCGCTTTATTTGACGCCGGTG |
| | AGCAGTGCGGGGGGAGTGGCGATTAAAGCTGGCTCATTAATTGCCGTGCTTATTTT |
| | GCGACAGACCAACAACTATAACAGCGATGATTTCCAGTTTGTGTGGAATATTTACG |
| | CCAATAATGATGTGGTGGTGCCCACTGGCGGCTGTGATGCT |
| CH40-22 | fumC_allele 40 (SEQ ID NO: 12) |
| | CGAGCGCCATTCGGCAGGCGGCGGATGAAGTACTGGCAGGACAGCATGACGACGAA |
| | TTCCCGCTGGCTATCTGGCAGACCGGCTCCGGCACGCAAAGTAACATGAATATGAA |
| | CGAAGTGCTGGCTAACCGGGCCAGTGAATTACTCGGTGGCGTGCGCGGGATGGAAC |
| | GTAAAGTTCACCCTAACGACGACGTGAACAAAAGCCAAAGTTCCAACGATGTCTTT |
| | CCGACGGCGATGCACGTTGCGGCACTACTGGCGCTGCGCAAGCAACTCATTCCACA |
| | ACTTAAAACCCTGACCCAGACGCTGAGTGAAAAATCCCGCGCATTTGCTGATATCG |
| | TCAAAATCGGTCGTACCCACTTGCAGGACGCCACGCCGTTAACGCTGGGGCAGGAG |
| | ATTTCCGGCTGGGTAGCGATGCTGGAGCATAATCTCAAACATATCGAATACAGCCT |
| | GCCTCACGTAGCGGAACTGGC |
| | fimH_allele 22 (SEQ ID NO: 25) |
| | TTCGCCTGTAAAACCGCCAATGGTACCGCAATCCCTATTGGCGGTGGCAGCGCCAA |
| | TGTTTATGTAAACCTTGCGCCTGCCGTGAATGTGGGGCAAAACCTGGTCGTGGATC |
| | TTTCGACGCAAATCTTTTGCCATAACGATTACCCGGAAACCATTACAGATTATGTC |
| | ACACTGCAACGAGGCTCGGCTTATGGCGGCGTGTTATCTAATTTTTCCGGGACCGT |
| | AAAATATAATGGCAGTAGCTATCCTTTCCCTACTACCAGCGAAACGCCGCGGGTTG |
| | TTTATAATTCGAGAACGGATAAGCCGTGGCCGGTGGCGCTTTATTTGACGCCTGTG |
| | AGCAGTGCGGGGGGAGTGGCGATTAAAGCTGGCTCATTAATTGCCGTGCTAATTTT |
| | GCGACAGACCAACAACTATAACAGCGATGATTTCCAGTTTGTGTGGAATATTTACG |
| | CCAATAATGATGTGGTGGTGCCTACTGGCGGCTGTGATGTT |
| CH14-27 | fumC_allele 14 (SEQ ID NO: 26) |
| | CGAGCGCCATTCGGCAGGCGGCGGATGAAGTACTGGCAGGACAGCATGACGACGAA |
| | TTCCCGCTGGCTATCTGGCAGACCGGCTCCGGCACGCAAAGTAACATGAACATGAA |
| | TGAAGTGCTGGCTAACCGGGCCAGTGAATTACTCGGCGGCGTGCGCGGGATGGAAC |
| | GTAAAGTTCACCCTAACGACGACGTGAACAAAAGCCAAAGTTCCAACGATGTCTTT |
| | CCGACGGCGATGCACGTTGCGGCACTACTGGCGCTGCGCAAGCAACTCATTCCACA |
| | ACTTAAAACCCTGACCCAGACGCTGAGTGAAAAATCCCGCGCATTTGCCGATATCG |
| | TCAAAATCGGTCGTACCCACTTGCAGGACGCGACGCCGTTAACGCTGGGGCAGGAG |
| | ATTTCCGGCTGGGTAGCGATGCTGGAGCATAATCTCAAACATATCGAATACAGCCT |
| | GCCTCACGTAGCGGAACTGGC |
| | fimH_allele 27 (SEQ ID NO: 15) |
| | TTCGCCTGTAAAACCGCCAATGGTACCGCTATCCCTATTGGCGGTGGCAGCGCCAA |
| | TGTTTATGTAAACCTTGCGCCCGTCGTGAATGTGGGGCAAAACCTGGTCGTGGATC |
| | TTTCGACGCAAATCTTTTGCCATAACGATTATCCGGAAACCATTACAGACTATGTC |
| | ACACTGCAACGAGGCTCGGCTTATGGCGGCGTGTTATCTAATTTTTCCGGGACCGT |
| | AAAATATAGTGGCAGTAGCTATCCATTTCCTACCACCAGCGAAACGCCGCGCGTTG |
| | TTTATAATTCGAGAACGGATAAGCCGTGGCCGGTGGCGCTTTATTTGACGCCTGTG |
| | AGCAGTGCGGGCGGGGTGGCGATTAAAGCTGGCTCATTAATTGCCGTGCTTATTTT |
| | GCGACAGACCAACAACTATAACAGCGATGATTTCCAGTTTGTGTGGAATATTTACG |
| | CCAATAATGATGTGGTGGTGCCTACTGGCGGCTGCGATGTT |
| CH24-30 | fumC_allele 24 (SEQ ID NO: 23) |
| | CGAGCGCCATTCGGCAGGCGGCGGATGAAGTACTGGCAGGACAGCATGACGACGAA |
| | TTCCCGTTGGCTATCTGGCAGACCGGCTCCGGCACGCAAAGTAACATGAACATGAA |
| | CGAAGTGCTGGCTAACCGGGCCAGTGAATTACTCGGCGGCGTGCGCGGGATGGAAC |
| | GTAAAGTTCACCCTAACGACGACGTGAACAAAAGCCAAAGTTCCAACGATGTCTTT |
| | CCGACGGCGATGCACGTTGCGGCGCTGCTGGCGCTGCGCAAGCAACTCATTCCACA |
| | ACTTAAAACCCTGACCCAGACGCTGAGTGAAAAATCCCGCGCATTTGCCGATATCG |
| | TCAAAATCGGTCGTACCCACTTGCAGGACGCCACGCCGTTAACGCTGGGGCAGGAG |
| | ATTTCCGGCTGGGTAGCGATGCTGGAGCATAATCTCAAACATATCGAATACAGCCT |
| | GCCTCACGTAGCGGAACTGGC |
| | fimH_allele 30 (SEQ ID NO: 13) |
| | TTCGCCTGTAAAACCGCCAATGGTACCGCTATTCCTATTGGCGGTGGCAGCGCTAA |
| | TGTTTATGTAAACCTTGCGCCTGCCGTGAATGTGGGGCAAAACCTGGTCGTAGATC |
| | TTTCGACGCAAATCTTTTGCCATAACGATTATCCGGAAACCATTACAGACTATGTC |
| | ACACTGCAACGAGGCTCGGCTTATGGCGGCGTGTTATCTAATTTTTCCGGGACCGT |
| | AAAATATAGTGGCAGTAGCTATCCATTTCCGACTACCAGCGAAACGCCGCGGGTTG |
| | TTTATAATTCGAGAACGGATAAGCCGTGGCCGGTGGCGCTTTATTTGACGCCTGTG |
| | AGCAGTGCGGGTGGGGTGGCGATTAAAGCTGGCTCATTAATTGCCGTGCTTATTTT |
| | GCGACAGACCAACAACTATAACAGCGATGATTTCCAGTTTGTGTGGAATATTTACG |
| | CCAATAATGATGTGGTGGTGCCTACTGGCGGCTGCGATGTT |
| CH38-27 | fumC_allele 38 (SEQ ID NO: 27) |
| | CGAGCGCCATTCGGCAGGCGGCGGATGAAGTACTGGCAGGACAGCATGACGACGAA |
| | TTCCCGCTGGCTATCTGGCAGACCGGCTCCGGCACGCAAAGTAACATGAACATGAA |
| | CGAAGTGCTGGCTAACCGGGCCAGTGAATTACTCGGCGGCGTGCGCGGGATGGAAC |
| | GTAAAGTTCACCCTAACGACGACGTGAACAAAAGCCAAAGTTCCAACGATGTCTTT |
| | CCGACGGCGATGCACGTTGCGGCGCTGCTGGCGCTGCGCAAGCAACTCATTCCACA |
| | ACTTAAAACCCTGACCCAGACGCTGAGTGAAAAATCCCGCGCATTTGCCGATATCG |
| | TCAAAATCGGTCGTACCCACTTGCAGGACGCCACGCCGTTAACGCTGGGGCAGGAG |
| | ATTTCCGGCTGGGTAGCGATGCTGGAGCATAATCTCAAACATATCGAATACAGCCT |
| | GCCTCACGTAGCGGAACTGGC |
| | fimH_allele 27 (SEQ ID NO: 15) |
| | TTCGCCTGTAAAACCGCCAATGGTACCGCTATCCCTATTGGCGGTGGCAGCGCCAA |
| | TGTTTATGTAAACCTTGCGCCCGTCGTGAATGTGGGGCAAAACCTGGTCGTGGATC |
| | TTTCGACGCAAATCTTTTGCCATAACGATTATCCGGAAACCATTACAGACTATGTC |
| | ACACTGCAACGAGGCTCGGCTTATGGCGGCGTGTTATCTAATTTTTCCGGGACCGT |
| | AAAATATAGTGGCAGTAGCTATCCATTTCCTACCACCAGCGAAACGCCGCGCGTTG |
| | TTTATAATTCGAGAACGGATAAGCCGTGGCCGGTGGCGCTTTATTTGACGCCTGTG |
| | AGCAGTGCGGGCGGGGTGGCGATTAAAGCTGGCTCATTAATTGCCGTGCTTATTTT |
| | GCGACAGACCAACAACTATAACAGCGATGATTTCCAGTTTGTGTGGAATATTTACG |
| | CCAATAATGATGTGGTGGTGCCTACTGGCGGCTGCGATGTT |
| CH40-20 | fumC_allele 40 (SEQ ID NO: 12) |
| | CGAGCGCCATTCGGCAGGCGGCGGATGAAGTACTGGCAGGACAGCATGACGACGAA |
| | TTCCCGCTGGCTATCTGGCAGACCGGCTCCGGCACGCAAAGTAACATGAATATGAA |
| | CGAAGTGCTGGCTAACCGGGCCAGTGAATTACTCGGTGGCGTGCGCGGGATGGAAC |
| | GTAAAGTTCACCCTAACGACGACGTGAACAAAAGCCAAAGTTCCAACGATGTCTTT |
| | CCGACGGCGATGCACGTTGCGGCACTACTGGCGCTGCGCAAGCAACTCATTCCACA |
| | ACTTAAAACCCTGACCCAGACGCTGAGTGAAAAATCCCGCGCATTTGCTGATATCG |
| | TCAAAATCGGTCGTACCCACTTGCAGGACGCCACGCCGTTAACGCTGGGGCAGGAG |
| | ATTTCCGGCTGGGTAGCGATGCTGGAGCATAATCTCAAACATATCGAATACAGCCT |
| | GCCTCACGTAGCGGAACTGGC |
| | fimH_allele 20 (SEQ ID NO: 28) |
| | TTCGCCTGTAAAACCGCCAATGGTACCGCAATCCCTATTGGCGGTGGCAGCGCCAA |
| | TGTTTATGTAAACCTTGCGCCTGCCGTGAATGTGGGGCAAAACCTGGTCGTGGATC |
| | TTTCGACGCAAATCTTTTGCCATAACGATTACCCGGAAACCATTACAGATTATGTC |
| | ACACTGCAACGAGGCTCGGCTTATGGTGGCGTGTTATCTAATTTTTCCGGGACCGT |
| | AAAATATAATGGCAGTAGCTATCCTTTCCCTACTACCAGCGAAACGCCGCGGGTTG |
| | TTTATAATTCGAGAACGGATAAGCCGTGGCCGGTGGCGCTTTATTTGACGCCTGTG |
| | AGCAGTGCGGGGGGAGTGGCGATTAAAGCTGGCTCATTAATTGCCGTGCTTATTTT |
| | GCGACAGACCAACAACTATAACAGCGATGATTTCCAGTTTGTGTGGAATATTTACG |
| | CCAATAATGATGTGGTGGTGCCCACTGGCGGCTGCGATGTT |
| CH24-9 | fumC_allele 24 (SEQ ID NO: 23) |
| | CGAGCGCCATTCGGCAGGCGGCGGATGAAGTACTGGCAGGACAGCATGACGACGAA |
| | TTCCCGTTGGCTATCTGGCAGACCGGCTCCGGCACGCAAAGTAACATGAACATGAA |
| | CGAAGTGCTGGCTAACCGGGCCAGTGAATTACTCGGCGGCGTGCGCGGGATGGAAC |
| | GTAAAGTTCACCCTAACGACGACGTGAACAAAAGCCAAAGTTCCAACGATGTCTTT |
| | CCGACGGCGATGCACGTTGCGGCGCTGCTGGCGCTGCGCAAGCAACTCATTCCACA |
| | ACTTAAAACCCTGACCCAGACGCTGAGTGAAAAATCCCGCGCATTTGCCGATATCG |
| | TCAAAATCGGTCGTACCCACTTGCAGGACGCCACGCCGTTAACGCTGGGGCAGGAG |
| | ATTTCCGGCTGGGTAGCGATGCTGGAGCATAATCTCAAACATATCGAATACAGCCT |
| | GCCTCACGTAGCGGAACTGGC |
| | fimH_allele 9 (SEQ ID NO: 29) |
| | TTCGCCTGTAAAACCGCCAATGGTACCGCAATCCCTATTGGCGGTGGCAGCGCCAA |
| | TGTTTATGTAAACCTTGCGCCTGCCGTGAATGTGGGGCAAAACCTGGTCGTAGATC |
| | TTTCGACGCAAATCTTTTGCCATAACGATTACCCAGAAACCATTACAGACTATGTC |
| | ACACTGCAACGAGGTTCGGCTTATGGCGGCGTGTTATCTAGTTTTTCCGGGACCGT |
| | AAAATATAATGGCAGTAGCTATCCTTTCCCTACTACCAGCGAAACGCCGCGGGTTG |
| | TTTATAATTCGAGAACGGATAAGCCGTGGCCGGTGGCGCTTTATTTGACGCCGGTG |
| | AGCAGTGCGGGGGGAGTGGCGATTAAAGCTGGCTCATTAATTGCCGTGCTTATTTT |
| | GCGACAGACCAACAACTATAACAGCGATGATTTCCAGTTTGTGTGGAATATTTACG |
| | CCAATAATGATGTGGTGGTGCCCACTGGCGGCTGTGATGTT |
| CH14-2 | fumC_allele 14 (SEQ ID NO: 26) |
| | CGAGCGCCATTCGGCAGGCGGCGGATGAAGTACTGGCAGGACAGCATGACGACGAA |
| | TTCCCGCTGGCTATCTGGCAGACCGGCTCCGGCACGCAAAGTAACATGAACATGAA |
| | TGAAGTGCTGGCTAACCGGGCCAGTGAATTACTCGGCGGCGTGCGCGGGATGGAAC |
| | GTAAAGTTCACCCTAACGACGACGTGAACAAAAGCCAAAGTTCCAACGATGTCTTT |
| | CCGACGGCGATGCACGTTGCGGCACTACTGGCGCTGCGCAAGCAACTCATTCCACA |
| | ACTTAAAACCCTGACCCAGACGCTGAGTGAAAAATCCCGCGCATTTGCCGATATCG |
| | TCAAAATCGGTCGTACCCACTTGCAGGACGCGACGCCGTTAACGCTGGGGCAGGAG |
| | ATTTCCGGCTGGGTAGCGATGCTGGAGCATAATCTCAAACATATCGAATACAGCCT |
| | GCCTCACGTAGCGGAACTGGC |
| | fimH_allele 2 (SEQ ID NO: 30) |
| | TTCGCCTGTAAAACCGCCAATGGTACCGCTATCCCTATTGGCGGTGGCAGCGCCAA |
| | TGTTTATGTAAACCTTGCGCCTGCCGTGAATGTGGGGCAAAACCTGGTCGTGGATC |
| | TTTCGACGCAAATCTTTTGCCATAACGATTACCCGGAAACCATTACAGACTATGTC |
| | ACACTGCAACGAGGTTCGGCTTATGGCGGCGTGTTATCTAGTTTTTCCGGGACCGT |
| | AAAATATAATGGCAGTAGCTATCCTTTCCCTACTACCAGCGAAACGCCGCGGGTTG |
| | TTTATAATTCGAGAACGGATAAGCCGTGGCCGGTGGCGCTTTATTTGACGCCTGTG |
| | AGCAGTGCGGGGGGAGTGGCGATTAAAGCTGGCTCATTAATTGCCGTGCTTATTTT |
| | GCGACAGACCAACAACTATAACAGCGATGATTTCCAGTTTGTGTGGAATATTTACG |
| | CCAATAATGATGTGGTGGTGCCCACTGGCGGCTGTGATGTT |
| CH38-5 | fumC_allele 38 (SEQ ID NO: 27) |
| | CGAGCGCCATTCGGCAGGCGGCGGATGAAGTACTGGCAGGACAGCATGACGACGAA |
| | TTCCCGCTGGCTATCTGGCAGACCGGCTCCGGCACGCAAAGTAACATGAACATGAA |
| | CGAAGTGCTGGCTAACCGGGCCAGTGAATTACTCGGCGGCGTGCGCGGGATGGAAC |
| | GTAAAGTTCACCCTAACGACGACGTGAACAAAAGCCAAAGTTCCAACGATGTCTTT |
| | CCGACGGCGATGCACGTTGCGGCGCTGCTGGCGCTGCGCAAGCAACTCATTCCACA |
| | ACTTAAAACCCTGACCCAGACGCTGAGTGAAAAATCCCGCGCATTTGCCGATATCG |
| | TCAAAATCGGTCGTACCCACTTGCAGGACGCCACGCCGTTAACGCTGGGGCAGGAG |
| | ATTTCCGGCTGGGTAGCGATGCTGGAGCATAATCTCAAACATATCGAATACAGCCT |
| | GCCTCACGTAGCGGAACTGGC |
| | fimH_allele5 (SEQ ID NO: 17) |
| | TTCGCCTGTAAAACCGCCAATGGTACCGCTATCCCTATTGGCGGTGGCAGCGCCAA |
| | TGTTTATGTAAACCTTGCGCCTGCCGTGAATGTGGGGCAAAACCTGGTCGTGGATC |
| | TTTCGACGCAAATCTTTTGCCATAACGATTACCCGGAAACCATTACAGACTATGTC |
| | ACACTGCAACGAGGTTCGGCTTATGGCGGCGTGTTATCTAGTTTTTCCGGGACCGT |
| | AAAATATAATGGCAGTAGCTATCCTTTCCCTACTACCAGCGAAACGCCGCGGGTTG |
| | TTTATAATTCGAGAACGGATAAGCCGTGGCCGGTGGCGCTTTATTTGACGCCTGTG |
| | AGCAGTGCGGGGGGAGTGGCGATTAAAGCAGGCTCATTAATTGCCGTGCTTATTTT |
| | GCGACAGACCAACAACTATAACAGCGATGATTTCCAGTTTGTGTGGAATATTTACG |
| | CCAATAATGATGTGGTGGTGCCCACTGGCGGCTGCGATGTT |
| CH38-41 | fumC_allele 38 (SEQ ID NO: 27) |
| | CGAGCGCCATTCGGCAGGCGGCGGATGAAGTACTGGCAGGACAGCATGACGACGAA |
| | TTCCCGCTGGCTATCTGGCAGACCGGCTCCGGCACGCAAAGTAACATGAACATGAA |
| | CGAAGTGCTGGCTAACCGGGCCAGTGAATTACTCGGCGGCGTGCGCGGGATGGAAC |
| | GTAAAGTTCACCCTAACGACGACGTGAACAAAAGCCAAAGTTCCAACGATGTCTTT |
| | CCGACGGCGATGCACGTTGCGGCGCTGCTGGCGCTGCGCAAGCAACTCATTCCACA |
| | ACTTAAAACCCTGACCCAGACGCTGAGTGAAAAATCCCGCGCATTTGCCGATATCG |
| | TCAAAATCGGTCGTACCCACTTGCAGGACGCCACGCCGTTAACGCTGGGGCAGGAG |
| | ATTTCCGGCTGGGTAGCGATGCTGGAGCATAATCTCAAACATATCGAATACAGCCT |
| | GCCTCACGTAGCGGAACTGGC |
| | fimH_allele 41 (SEQ ID NO: 20) |
| | TTCGCCTGTAAAACCGCCAATGGTACAGCTATCCCTATTGGCGGTGGCAGCGCTAA |
| | TGTTTATGTAAACCTTGCGCCCGCCGTGAATGTGGGGCAAAACCTGGTCGTAGATC |
| | TTTCGACGCAAATCTTTTGCCATAACGATTATCCGGAAACCATTACAGACTATGTC |
| | ACACTGCAACGAGGCTCGGCTTATGGCGGCGTGTTATCTAATTTTTCCGGGACCGT |
| | AAAATATAGTGGCAGTAGCTATCCATTTCCTACCACCAGCGAAACGCCGCGCGTTG |
| | TTTATAATTCGAGAACGGATAAGCCGTGGCCGGTGGCGCTTTATTTGACGCCTGTG |
| | AGCAGTGCGGGCGGGGTGGCGATTAAAGCTGGCTCATTAATTGCCGTGCTTATTTT |
| | GCGACAGACCAACAACTATAACAGCGATGATTTCCAGTTTGTGTGGAATATTTACG |
| | CCAATAATGATGTGGTGGTGCCCACTGGCGGCTGTGATGTT |
| CH38-15 | fumC_allele 38 (SEQ ID NO: 27) |
| | CGAGCGCCATTCGGCAGGCGGCGGATGAAGTACTGGCAGGACAGCATGACGACGAA |
| | TTCCCGCTGGCTATCTGGCAGACCGGCTCCGGCACGCAAAGTAACATGAACATGAA |
| | CGAAGTGCTGGCTAACCGGGCCAGTGAATTACTCGGCGGCGTGCGCGGGATGGAAC |
| | GTAAAGTTCACCCTAACGACGACGTGAACAAAAGCCAAAGTTCCAACGATGTCTTT |
| | CCGACGGCGATGCACGTTGCGGCGCTGCTGGCGCTGCGCAAGCAACTCATTCCACA |
| | ACTTAAAACCCTGACCCAGACGCTGAGTGAAAAATCCCGCGCATTTGCCGATATCG |
| | TCAAAATCGGTCGTACCCACTTGCAGGACGCCACGCCGTTAACGCTGGGGCAGGAG |
| | ATTTCCGGCTGGGTAGCGATGCTGGAGCATAATCTCAAACATATCGAATACAGCCT |
| | GCCTCACGTAGCGGAACTGGC |
| | fimH_allele 15 (SEQ ID NO: 31) |
| | TTCGCCTGTAAAACCGCCAATGGTACCGCAATCCCTATTGGCGGTGGCAGCGCCAA |
| | TGTTTATGTAAACCTTGCGCCTGCCGTGAATGTGGGGCAAAACCTGGTCGTAGATC |
| | TTTCGACGCAAATCTTTTGCCATAACGATTACCCAGAAACCATTACAGACTATGTC |
| | ACACTGCAACGAGGTTCGGCTTATGGCGGCGTGTTATCTAGTTTTTCCGGGACCGT |
| | AAAATATAATGGCAGTAGCTATCCTTTCCCTACTACCAGCGAAACGCCGCGGGTTG |
| | TTTATAATTCGAGAACGGATAAGCCGTGGCCGGTGGCGCTTTATTTGACGCCGGTG |
| | AGCAGTGCGGGGGGAGTGGCGATTAAAGCTGGCTCATTAATTGCCGTGCTTATTTT |
| | GCGACAGACCAACAACTATAACAGCGATGATTTCCAGTTTGTGTGGAATATTTACG |
| | CCAATAATGATGTGGTGGTGCCCACTGGCGGCTGCGATGTT |
| CH52-14 | fumC_allele 52 (SEQ ID NO: 32) |
| | CGAGCGCCATTCGGCAGGCGGCGGATGAAGTACTGGCAGGACAGCATGACGACGAA |
| | TTCCCGCTGGCTATCTGGCAGACCGGCTCCGGCACGCAAAGTAACATGAACATGAA |
| | CGAAGTGCTGGCTAACCGGGCCAGTGAATTACTCGGTGGCGTGCGCGGGATGGAAC |
| | GTAAAGTTCACCCTAACGACGACGTGAACAAAAGCCAAAGTTCCAACGATGTCTTT |
| | CCGACGGCGATGCACGTTGCGGCACTACTGGCGCTGCGCAAGCAACTCATTCCACA |
| | ACTTAAAACCCTGACCCAGACGCTGAGTGAAAAATCCCGCGCATTTGCTGATATCG |
| | TCAAAATCGGTCGTACCCACTTGCAGGACGCGACGCCGTTAACGCTGGGGCAGGAG |
| | ATTTCCGGCTGGGTAGCGATGCTGGAGCATAATCTCAAACATATCGAATACAGCCT |
| | GCCTCACGTAGCGGAACTGGC |
| | fimH_allele 14 (SEQ ID NO: 33) |
| | TTCGCCTGTAAAACCGCCAATGGTACCGCAATCCCTATTGGCGGTGGCAGCGCCAA |
| | TGTTTATGTAAACCTTGCGCCTGCCGTGAATGTGGGGCAAAACCTGGTCGTGGATC |
| | TTTCGACGCAAATCTTTTGCCATAACGATTACCCGGAAACCATTACAGACTATGTC |
| | ACACTGCAACGAGGTTCGGCTTATGGCGGCGTGTTATCTAGTTTTTCCGGGACCGT |
| | AAAATATAATGGCAGTAGCTATCCTTTCCCTACTACCAGCGAAACGCCGCGGGTTG |
| | TTTATAATTCGAGAACGGATAAGCCGTGGCCGGTGGCGCTTTATTTGACGCCGGTG |
| | AGCAGTGCGGGGGGAGTGGCGATTAAAGCTGGCTCATTAATTGCCGTGCTTATTTT |
| | GCGACAGACCAACAACTATAACAGCGATGATTTCCAGTTTGTGTGGAATATTTACG |
| | CCAATAATGATGTGGTGGTGCCCACTGGCGGCTGTGATGTT |

[0054] In additional embodiments, the typing indicates efficacy of an antibiotic treatment. For example, the CH40-30, CH4-27, CH11-54, CH13-5, CH40-22 and CH35-27 clonotypes are resistant to certain antibiotic treatments (e.g. AMP, TET, A/S, T/S, A/K, CEF or CIP), while the CH38-41, CH38-15, CH52-14, CH24-9 and CH14-2 clonotypes are susceptible to certain antibiotic treatments (e.g., AMP, TET, A/S, T/S, A/K, CEF or CIP). In such an example, if clonotype CH40-30 was identified as being resistant to a specific antibiotic (e.g., AMP), then ampicillin would not be considered to be effective in treating the E. coli clonotype CH40-30 with an antibiotic treatment comprising ampicillin. In another example, if clonotype CH38-41 was identified as being sensitive to a specific antibiotic (e.g., AMP), then ampicillin would be considered to be effective in treating the E. coli clonotype CH38-41 with an antibiotic treatment comprising ampicillin. Antibiotic or antimicrobial treatments or therapies include any agent, or combination of agents, that selectively kills or inhibits the growth of E. coli. Antibiotics may include, but are not limited to ampicillin (AMP), tetracycline (TET), ampicillin-sulbactam (A/S), trimethoprimsulfamethoxazole (T/S), amoxicillin-clavulanate (A/K), cefazolin (CZ), ciprofloxacin (CIP), gentamicin (GM), nitrofurantoin (NIT), ceftriaxone (CTR) and/or piperacillin-tazobactam (PTZ).

[0055] In one embodiment of the invention, the typing is carried out after the subject has undergone treatment for the disease state or the infection with antibiotic resistant E. coli, and the typing indicates efficacy of the treatment. The methods of the invention may be used to identify what clonotypes are present after treatment. This could determine, for example, if the treatment eradicated the disease-causing E. coli; or if the antibiotic resistant E. coli are still present. In another embodiment, the methods of the invention could be used to identify a single strain, two strains or three strains etc., as causative or likely to be causative of a disease prior to treatment, during treatment or after treatment.

[0056] The nucleic acid sequence of any suitable portion of the fimH gene can be determined to carry out the methods of the invention. In one embodiment, the entirety of the fimH gene can be determined. In another embodiment, a portion of the fimH gene can be determined. In some embodiments, a fragment suitable for efficient molecular typing (<500 nt) may be used. The portion of fimH sequenced may include the nucleotides encoding mature peptide codons 1 to 163 corresponding to nucleotides 1-489 of reference sequence SEQ ID NO:04, which span the entire mannose binding lectin domain, the interdomain linker, and a few N-terminal residues of the pilin domain. In one embodiment, the portion of the fimH gene is amplified by an oligonucleotide primer pair consisting of 5′-CACTCAGGGAACCATTCAGGCA-3′ (SEQ ID NO: 01) and 5′-CTTATTGATAAACAAAAGTCAC-3′ (SEQ ID NO: 02).

[0057] In one embodiment, sequencing of the fumC gene is combined with fimH. In this embodiment, the nucleic acid sequence of any suitable portion of the fumC gene can be determined to carry out the methods of the invention. In one embodiment the entirety of the fumC gene locus can be determined. In another embodiment, a portion of the fumC gene locus can be determined. In some embodiments, a fragment of the fumC gene suitable for efficient molecular typing (<500 nt) may be used. In another embodiment, the portion of the fumC gene is amplified by an oligonucleotide primer pair specific for an ˜500 nt fragment, an ˜400 nt fragment, an ˜300 nt fragment, an ˜200 nt fragment or an ˜100 nt fragment as designed by person of ordinary skill in the art for efficient molecular typing. As shown in the examples below, the inventors discovered that pairing fumC with fimH provided the best ability to distinguish E. coli substrains. FumC was selected for pairing with fimH in this clonotyping scheme because, of the 7 MLST loci, it (i) provided the best discriminatory power when combined with fimH, (ii) exhibited the highest level of nucleotide polymorphism, and (iii) was best able to predict the phylogenetic group. This combination of fumC and fimH provided greater discriminatory power than standard 7-locus MLST, which over the past decade replaced multilocus enzyme electrophoresis as the standard method for studying E. coli population structure.

[0058] Surprisingly, clonotyping based on fumC and fimH(CH clonotype) identified specific STs or ST complexes for more than 90% of the isolates. CH clonotyping is applicable as a molecular tool for both applied and basic investigations regarding the epidemiology and population structure of E. coli. For example, CH clonotyping can be used to screen isolates in suspected point source outbreaks and to evaluate large clinical isolate collections for sub-ST clonal diversity (e.g., in population studies of antimicrobial resistance).

[0059] Furthermore, the inventors have discovered that the clonotypes of E. coli isolates, as inferred from fumC and fimH, are linked to distinct antimicrobial susceptibility profiles and clinical manifestations. These findings indicate that a clonotype-guided approach substantially reduces the likelihood of drug-bug mismatches during the course of initial antimicrobial therapy by providing more specific data about a patient's actual organism. Furthermore, if clonotyping profiles are made available in a timely fashion as part of clinical laboratory diagnostics, trimethoprim-sulfamethoxazole and/or fluoroquinolones can be used with higher confidence against the majority of clinical E. coli isolates, with projected averages of 3- and 5-fold reductions, respectively, in the likelihood of drug-bug mismatch compared with standard empirical use of the corresponding antimicrobials. Thus, greater certainty from the outset regarding which antimicrobials can and cannot be used reliably for a given patient with suspected E. coli infection will be of great benefit to patients and health care systems alike.

[0060] In another embodiment, sequencing of the adk gene is combined with fimH. In this embodiment, the entirety of the adk gene locus can be determined. In another embodiment, a portion of the adk gene locus can be determined. In some embodiments, a fragment of the adk gene suitable for efficient molecular typing (<500 nt) may be used.

[0061] In a further embodiment, sequencing of the gyrB gene is combined with fimH In this embodiment, the entirety of the gyrB gene locus can be determined. In another embodiment, a portion of the gyrB gene locus can be determined. In some embodiments, a fragment of the gyrB gene suitable for efficient molecular typing (<500 nt) may be used.

[0062] In yet another embodiment, sequencing of the icd gene is combined with fimH. In this embodiment, the entirety of the icd gene locus can be determined. In another embodiment, a portion of the icd gene locus can be determined. In some embodiments, a fragment of the icd gene suitable for efficient molecular typing (<500 nt) may be used.

[0063] In another embodiment, sequencing of the mdh gene is combined with fimH. In this embodiment, the entirety of the mdh gene locus can be determined. In another embodiment, a portion of the mdh gene locus can be determined. In some embodiments, a fragment of the mdh gene suitable for efficient molecular typing (<500 nt) may be used.

[0064] In another embodiment, sequencing of the purA gene is combined with fimH. In this embodiment, the entirety of the purA gene locus can be determined. In another embodiment, a portion of the purA gene locus can be determined. In some embodiments, a fragment of the purA gene suitable for efficient molecular typing (<500 nt) may be used.

[0065] In another embodiment, sequencing of the recA gene is combined with fimH. In this embodiment, the entirety of the recA gene locus can be determined. In another embodiment, a portion of the recA gene locus can be determined. In some embodiments, a fragment of the recA gene suitable for efficient molecular typing (<500 nt) may be used.

[0066] Any suitable amplification technique can be used, including but not limited to PCR, RT-PCT, qPCR, spPCR, etc. Suitable amplification conditions can be determined by those of skill in the art based on the particular primer pair design and other factors, based on the teachings herein.

[0067] Any suitable sequencing technique can be used, including but not limited to Sanger sequencing, Maxam-Gilbert sequencing, or any of the next generation sequencing methods (e.g., pryoseqeuncing (454); sequencing by synthesis (Illumina); ion torrent sequencing, single-molecule real-time sequencing or SOLiD sequencing etc. Suitable sequencing conditions can be determined by those of skill in the art based on the particular factors, based on the teachings herein.

[0068] In a second aspect, the invention provides a composition consisting of between 2-5 oligonucleotide primer pairs, wherein: (a) a first primer pair selectively amplifies a region of a fimH gene; and (b) a second primer pair selectively amplifies a region of a gene selected from the group consisting of fumC, adk, gyrB, icd, mdh, purA, and recA. In some embodiments of the second aspect of the invention, the first primer pair consists of 5′-CACTCAGGGAACCATTCAGGCA-3′ (SEQ ID NO: 01) and 5′-CTTATTGATAAACAAAAGTCAC-3′ (SEQ ID NO: 02).

[0069] In one embodiment of the second aspect of the invention, 2 primer pairs are used, 3 primer pairs are use, 4 primer pairs are used or 5 primer pairs are used. In this embodiment, primer pairs would be selected from oligonucleotides capable of amplifying the entirety or a portion of the fimH gene along with the entirety or a portion of at least one or more of the genes selected from the fumC, adk, gyrB, icd, mdh, purA, and recA.

[0070] In one embodiment of the second aspect, a primer pair for the fumC gene is combined with a primer pair for fimH. In this embodiment, the primer pair would sequence the entirety of the fumC gene locus. In another embodiment, a portion of the fumC gene locus can be determined by the fumC primer pair. In some embodiments, a primer pair specific for a fragment of the fumC gene suitable for efficient molecular typing (<500 nt) may be used. In another embodiment, the portion of the fumC gene is amplified by an oligonucleotide primer pair specific for an ˜500 nt fragment, an ˜400 nt fragment, an ˜300 nt fragment, an ˜200 nt fragment or an ˜100 nt fragment as designed by person of ordinary skill in the art for efficient molecular typing. As shown in the examples below, the inventors discovered that pairing fumC with fimH was the most suitable. FumC was selected as a housekeeping locus for pairing with fimH in this clonotyping scheme because, of the 7 MLST loci, it (i) provided the best discriminatory power, (ii) exhibited the highest level of nucleotide polymorphism, and (iii) was best able to predict the phylogenetic group. This combination of fumC and fimH provided greater discriminatory power than standard 7-locus MLST, which over the past decade replaced multilocus enzyme electrophoresis as the standard method for studying E. coli population structure.

[0071] In another embodiment of the second aspect of the invention, a primer pair for the adk gene is combined with the fimH primer pair. In this embodiment, the entirety of the adk gene locus can be determined by the primer pair. In another embodiment, a portion of the adk gene locus can be determined by the primer pair. In some embodiments, a fragment of the adk gene suitable for efficient molecular typing (<500 nt) may be used.

[0072] In a further embodiment of the second aspect of the invention, a primer pair for the gyrB gene is combined with the fimH primer pair. In this embodiment, the entirety of the gyrB gene locus can be determined by the primer pair. In another embodiment, a portion of the gyrB gene locus can be determined by the primer pair. In some embodiments, a fragment of the gyrB gene suitable for efficient molecular typing (<500 nt) may be used.

[0073] In yet another embodiment of the second aspect of the invention, a primer pair for the icd gene is combined with the fimH primer pair. In this embodiment, the entirety of the icd gene locus can be determined by the primer pair. In another embodiment, a portion of the icd gene locus can be determined by the primer pair. In some embodiments, a fragment of the icd gene suitable for efficient molecular typing (<500 nt) may be used.

[0074] In another embodiment of the second aspect of the invention, a primer pair for the mdh gene is combined with the fimH primer pair. In this embodiment, the entirety of the mdh gene locus can be determined by the primer pair. In another embodiment, a portion of the mdh gene locus can be determined by the primer pair. In some embodiments, a fragment of the mdh gene suitable for efficient molecular typing (<500 nt) may be used.

[0075] In another embodiment of the second aspect of the invention, a primer pair for the purA gene is combined with the fimH primer pair. In this embodiment, the entirety of the purA gene locus can be determined by the primer pair. In another embodiment, a portion of the purA gene locus can be determined by the primer pair. In some embodiments, a fragment of the purA gene suitable for efficient molecular typing (<500 nt) may be used.

[0076] In another embodiment of the second aspect of the invention, a primer pair for the recA gene is combined with the fimH primer pair. In this embodiment, the entirety of the recA gene locus can be determined by the primer pair. In another embodiment, a portion of the recA gene locus can be determined by the primer pair. In some embodiments, a fragment of the recA gene suitable for efficient molecular typing (<500 nt) may be used.

[0077] “Primer pair” means an oligonucleotide pair, either natural or synthetic that is capable, upon forming a duplex with a polynucleotide template, of acting as a point of initiation of nucleic acid synthesis and being extended from its 3′ end along the template so that an extended duplex is formed. The sequence of nucleotides added during the extension process is determined by the sequence of the template polynucleotide. Primers usually are extended by a DNA polymerase.

[0078] The term “nucleic acid” refers to deoxyribonucleotides or ribonucleotides and polymers thereof in either single- or double-stranded form. The term nucleic acid is used interchangeably with gene, cDNA, and mRNA encoded by a gene.

### EXEMPLARY ASPECTS

[0079] Below are examples of specific aspects for carrying out the present invention. The examples are offered for illustrative purposes only, and are not intended to limit the scope of the present invention in any way. Efforts have been made to ensure accuracy with respect to numbers used (e.g., amounts, temperatures, and the like), but some experimental error and deviation should, of course, be allowed for.

### Materials and Methods

[0080] Reference E. coli Strains.

[0081] The primary (reference) study strain collection included 191 commensal and pathogenic isolates of E. coli, including 70 strains from the E. coli reference (ECOR) collection and 38 strains with publicly available genome sequences. Two of the ECOR specimens—ECOR 43 and ECOR 59—were excluded from further study after confirmatory molecular testing failed to yield the expected profiles.

[0082] An additional 83 mainly extra-intestinal isolates were included, of which 75 have been described previously. The 8 previously unpublished strains were urine or fecal isolates from humans and domesticated animals with acute UTI and included fecal isolate HFP004, from a collection of fecal isolates recovered from women with acute UTI (and their household members) treated at a family practice clinic in the Minneapolis, Minn. area; clinical isolates JRF12A, JRF15A, JRF16A, JRF22A, JRF26A, and JRF173, from dogs or cats with acute UTI evaluated at an ambulatory veterinary practice in San Diego County, Calif.; and HI#2, a urine isolate collected from a healthy adult female with cystitis at the University of Washington, Seattle, Wash. Previously unpublished isolates were assigned to 1 of the 4 traditionally recognized E. coli phylogenetic groups (A, B1, B2, and D) based on either PCR-based phylotyping, as previously described, or clustering with reference strains in a dendrogram based on concatenated MLST sequences.

### Fresh Clinical (Current) E. Coli Isolates.

[0083] The collection of fresh clinical (current) E. coli isolates consisted of 853 consecutive E. coli isolates recovered in the clinical microbiology laboratories of several medical institutions during the routine processing of various clinical specimens-mainly urine (91%), but also wound (3%), blood (2%), and other specimens—between October 2010 and January 2011. Of the current isolates, 300 were obtained from the Group Health Cooperative (Seattle, Wash.), 200 were from the University of Washington Medical Center (Seattle, Wash.), 143 were from the Harborview Medical Center (Seattle, Wash.), 110 were from the Minneapolis Veterans Administration Medical Center (Minneapolis, Minn.), and 100 were from Seattle Children's Hospital (Seattle, Wash.).

MLST and fimH Sequencing.

[0084] Amplification and sequencing of the MLST loci were done as previously described. For fimH amplification and sequencing, the following fimH primers were used: fimH-F (SEQ ID NO: 01), CACTCAGGGAACCATTCAGGCA (binds 50 to 72 nucleotides [nt] upstream of fimH start); fimH-R (SEQ ID NO: 02), CTTATTGATAAACAAAAGTCAC (spans the last 21 nt of fimH). When necessary, the following mid primer was used to complete full-length fimH sequencing: fimH-mid (SEQ ID NO: 03), CGTTGTTTATAATTCGAG (binds nt 339 to 356 of fimH). The thermocycler program for all reactions consisted of 1 cycle of 94° C. for 5 min, followed by 30 cycles of 94° C. for 30 s, 57° C. for 15 s, and 72° C. for 1 min. Contigs were assembled using BioNumerics (Applied Maths, Sint-Martens-Latem, Belgium). To describe the predicted FimH peptides associated with each allele, the consensus FimH protein that carries the most conserved residue at each amino acid position in the mature peptide was selected as the reference. Amino acids in the signal peptide were numbered 1 (start codon) through 21 and are indicated throughout this report with a preceding minus sign.

Identification of fimH-null Strains.

[0085] Strains with publicly available genomes were assigned fimH-null status if they were found to have any interruption (e.g., by insertion sequence) or deletion of the region flanked by fimH primer annealing sites (as for 7 strains). Strains sequenced de novo for this study were assigned fimH-null status if they did not amplify a product of the expected size (975 bp) with the fimH primers used here (as for 5 ECOR strains).

### Phylogenetic Analysis.

[0086] For each strain, the seven MLST gene fragments were concatenated into a single sequence of approximately 3,500 nucleotides. PAUP* 4.0b was used to generate maximum-likelihood DNA trees for concatenated MLST sequences and for full-length fimH sequences.

Phylogenetic Analysis of Current E. coli.

[0087] Of 853 isolates, 611 (72%) had all 7 MLST genes sequenced, 5% had 6, 4.7% had 5, 6% had 4, 10% had 3, and 2% had only 2 MLST genes sequenced. The isolates that underwent less-than-full MLST analysis had a unique combination of sequenced genes that placed them in one of several major ST complexes with high probability (P<0.0001).

### Nucleotide Polymorphism Analysis.

[0088] Nucleotide polymorphism was measured by average pairwise diversity index, n, using MEGA version 4. The polymorphism plot was derived from a series of n values across overlapping windows of 100 nucleotides with a step size of 50 nucleotides using ProSeq v2.91.

### Discriminatory Power and Cluster Correlation Analyses.

[0089] Discriminatory power was analyzed using Simpson's index of diversity (D) (12), which quantifies the likelihood that two individuals selected randomly from the same population will exhibit different types. Thus, the relative discriminatory power of two typing methods can be compared directly using D when they are applied to the same population. Correlation of clustering techniques was evaluated using the Wallace coefficient, which measures the probability that paired strains assigned to the same genotype group by one method are also classified in the same type by the other method. The publicly available script described by Carrico and colleagues on the World Wide Web at biomath.itqb.unl.pt/ClusterComp was implemented in BioNumerics.

### Isolates and Patients.

[0090] The primary set of 1,518 recent clinical E. coli isolates consisted of consecutive single-patient human extraintestinal isolates recovered between October 2010 and June 2011 at five clinical microbiology laboratories serving distinct patient populations in Seattle, Wash. (Group Health Cooperative, Harborview Medical Center, Seattle Children's Hospital, and the University of Washington Medical Center), and Minneapolis, Minn. (Veterans Affairs Medical Center). For 20% of the isolates (those from Group Health), the supplying clinical laboratory reported that the isolates came almost exclusively from urine specimens, which agrees with the clinical context in that Group Health serves ambulatory patients only. For the rest of the collection, 93% of those isolates were from urine, 2% from blood, and 5% from miscellaneous other sample sites (sputum, wound, abscess, etc.). Another set of E. coli isolates was obtained from the University Hospital in Munster, Germany, and consisted of 161 consecutive isolates from urine samples recovered from July to September 2012.

[0091] Among the 1,518 primary set isolates, data regarding the presence of sepsis were available for 1,133 isolates, and data regarding the persistence or recurrence of infection were available for 1,034 urine isolates. The latter were classified as (i) single-episode bacteriuria (no clinical or microbiological evidence of recurrence within 30 days after the index culture) or (ii) recurrent UTI (clinical or microbiological evidence of persistence or recurrence beyond 7 days and within 30 days following the initial resolution of symptoms). Drug-bug mismatch in relation to the initially chosen antimicrobial therapy was analyzed in 676 urine isolates within the primary set (for 10 out of 676 patients, information about recurrence or persistence of infection was not available). The specific regimens used were diverse, and because of small subgroups, a detailed analysis of each regimen in relation to an organism would provide too little value to justify its inclusion in the study. The most relevant consideration analyzed and summarized in the report is whether the particular regimen chosen was active in vitro against each patient's infecting organism. Local institutional review boards approved the study protocol.

### Susceptibility Testing.

[0092] Antimicrobial susceptibility profiles were determined using disk diffusion testing. The interpretive criteria were those specified by the Clinical and Laboratory Standards Institute (CLSI).

Clonal Typing of E. coli Isolates.

[0093] Internal (<500 bp) regions of fumC and fimH were amplified by PCR, and the DNA sequences were determined by Sanger sequencing. Each unique combination of fumC and fimH alleles defined a CH clonotype. The diversity of the clonotype distribution was evaluated using the Simpson's modified alpha-diversity index.

### Statistical Analysis of Antimicrobial Susceptibility of Major CH Clonotypes.

[0094] The prevalence of susceptibility to individual agents was calculated for the total primary collection, for individual participating laboratories, and for individual CH clonotypes. Odds ratios (ORs) were calculated for each subgroup (i.e., laboratory or clonotype) relative to the rest of the population. If the OR was >2 or <0.5, its statistical significance was evaluated using Fisher's exact test.

### Clonotype-Guided Algorithm for Prediction of Antimicrobial Resistance.

[0095] Each isolate in the primary collection was classified as resistant or susceptible to each of the 11 antimicrobials based on the prevalence of susceptibility to the particular antimicrobial in the rest of isolates belonging to the same clonotype (i.e., for each isolate classification, the susceptibility of the corresponding clonotype was recalculated by excluding the profile of the isolate to be classified). Thus, clonotype-guided antibiotic selection was evaluated only for isolates from clonotypes comprising greater than or equal to 2 isolates. An isolate was hypothetically “allowed” to be treated with that agent if its clonotype susceptibility to that agent was greater than or equal to 80%, whereas if its susceptibility was <80%, it was classified as resistant and was “rejected” for treatment with the agent.

### Clonotype Identification Directly in Urine Specimens.

[0096] Greater than 50 clinical urine specimens (generally, using the boric acid preservative that allows urine to be kept at room temperature) were submitted to microbiology laboratories for the culture and susceptibility tests. One milliliter of each urine specimen was spun down for 1 minute at 10,000 rpm, the sediment was resuspended in 100 microliters of distilled water, and heated at 98° C. for 5 min. This sample was used at a final dilution of 1:10 for either quantitative PCR (qPCR) or pyrosequencing testing. qPCR was performed on LightCycler 2.0 (Hoffmann-La Roche, Inc.) using gene- or single-nucleotide polymorphism (SNP)-based primers specific to the clonotype CH40-30. The gene-based probes targeted the rMST1 gene region described earlier (7). Pyrosequencing was performed on PyroMark Q24 (Qiagen, Inc.), targeting the short most-clonotype-variable (<60 bp) internal regions of fimH and fumC.

### Example 1

### Discriminatory Power and Congruence of fimH and MLST

[0097] To evaluate the suitability of fimH as a typing locus, the 7-locus MLST profiles and full-length fimH sequence of 191 reference E. coli strains were determined. The individual MLST loci exhibited 26 to 37 alleles each (Table 1). An intact, full-length fimH sequence was obtained from 179 (94%) of the 191 reference strains, with 67 unique, full-length fimH alleles observed; the 12 fimH-nullπ strains derived from the ECOR (5 strains) and publicly available genome (7 strains) collections. Thus, fimH exhibited greater sequence variation than the individual MLST housekeeping genes. The congruence of the fimH and MLST phylogenies was examined next. In total, 91 unique MLST profiles (STs) were encountered among the reference strains, all differing by at least 1 nt in one locus and spanning the 4 traditionally recognized phylogenetic groups of E. coli, i.e., groups A, B1, B2, and D (FIG. 1, left panel). Of the 67 full-length fimH alleles, 58 were associated with a single phylogenetic group. This subset included the 25 alleles encoding FimH polymorphism N78 (FIG. 1, Phylo B2), all of which were associated with phylogenetic group B2, and 7 alleles that appeared in multiple STs but all within a given phylogenetic group (FIG. 1; Phylo B1, Phylo A and Phylo D). Thus, these fimH alleles could be defined as phylogenetically restricted alleles. The remaining 9 alleles were associated with STs in 2 or more phylogenetic groups (FIG. 1, black cross lines), indicating that certain fimH alleles frequently move horizontally among phylogenetically distant lineages of E. coli and could be defined as phylogenetically dispersed alleles.

TABLE 1
Numbers of types found and D values of individual
and combined loci of 191 diverse _{E. coli} isolates

| | | | |
|---|---|---|---|
| Typing method | # of types found | D | 95% CI |

Single loci

| | | | |
|---|---|---|---|
| adk | 35 | 0.890 | (0.869-0.919) |
| fumC | 37 | 0.911 | (0.887-0.935) |
| gyrB | 37 | 0.887 | (0.858-0.915) |
| icd | 31 | 0.888 | (0.865-0.915) |
| mdh | 26 | 0.851 | (0.810-0.891) |
| purA | 28 | 0.839 | (0.802-0.877) |
| recA | 29 | 0.893 | (0.869-0.912) |
| fimH | 68 | 0.967 | (0.959-0.976) |
| fimHTR | 59 | 0.962 | (0.953-0.972) |

Loci paired with fimH

| | | | |
|---|---|---|---|
| adk + fimHTR | 99 | 0.986 | (0.982-0.991) |
| fumC + fimHTR | 102 | 0.988 | (0.983-0.992) |
| gyrB + fimHTR | 103 | 0.987 | (0.983-0.992) |
| icd + fimHTR | 98 | 0.987 | (0.983-0.992) |
| mdh + fimHTR | 96 | 0.986 | (0.981-0.990) |
| purA + fimHTR | 95 | 0.986 | (0.982-0.990) |
| recA + fimHTR | 98 | 0.987 | (0.983-0.991) |
| MLST alone | 91 | 0.951 | (0.930-0.972) |
| MLST + fimH | 126 | 0.991 | (0.986-0.995) |
| MLST + fimHTR | 123 | 0.990 | (0.986-0.995) |

### Example 2

### Trimming fimH for Typing Applications

[0098] Human Sequence typing customarily uses a relatively short region of each locus (400 to 500 bp) to allow sequence determination by using only two primers. To identify an internal fragment of fimH suitable for typing purposes, sequence polymorphism analysis was performed on the 67 unique full-length fimH sequences in the reference collection. The distribution of polymorphisms was measured between the two functional domains of fimH: the N-terminal lectin domain (encoded by nt 64 to 540), which contains the mannose-specific binding pocket, and the C-terminal pilin domain (nt 541 to 900), which anchors the FimH subunit to the type 1 fimbrial shaft (pilus). According to π values (average number of polymorphisms per nucleotide), the lectin domain (overall n=0.022) was significantly more diverse (P_{—}0.02) than the pilin domain (overall π=0.013; FIG. 2). The lectin domain-encoding region of fimH was actually more diverse than 6 of the 7 MLST loci (π range of 0.008 to 0.015, P<0.05) and comparable only to that of fumC (π=0.026; P=0.37).

[0099] A location of “hot-spot” amino acid residues within FimH was considered. This region has repeatedly been targeted by amino acid replacement mutations that have pathogenicity-enhancing (pathoadaptive) effects on E. coli (36). In the fimH sequences of the reference strains, a total of 4 hotspots were identified, 3 of which (codons 27, 66, and 74) occurred within the lectin domain of FimH and the fourth of which (codon 163) occurred within the proximal portion of the pilin domain.

[0100] Using these data, a 489-bp segment was identified (here referred to as the fimH typing region [fimHTR]) that begins at the first codon of the mature peptide and ends after mature peptide codon 163 (nt 550 to 552; FIG. 2, approximated in red).

### Example 3

### Discriminatory Power of fimHTR-Based Typing

[0101] Within the reference collection, fimHTR distinguished 58 alleles, in comparison to the 67 alleles distinguished by full-length fimH. For typing purposes, fimH-null status was also defined as an additional character state (i.e., as an additional “allele”). According to the Simpson's D diversity index estimates, although full-length fimH distinguished more alleles than fimHTR, the discriminatory powers (i.e., the population diversity based on the locus sequence) of these 2 regions were nearly equivalent, with D 0.967 (confidence interval [CI], 0.959 to 0.976) for full-length fimH and D_{—}0.962 (CI, 0.953 to 0.972) for fimHTR. Thus, each exceeded the discriminatory power of individual MLST loci and was not different from that of 7-locus MLST (Table 1).

[0102] Each of the 7 MLST loci was evaluated to select the best candidate for pairing with fimHTR to increase typing resolution. Among the 7 MLST loci, fumC demonstrated numerically the greatest discriminatory power (D=0.911; CI, 0.887 to 0.935), although the values overlapped with most remaining loci (Table 1). Pairing fimHTR with fumC produced the numerically highest discriminatory power (D=0.988; CI, 0.983 to 0.992) of all such pairings and significantly exceeded the discriminatory power of full MLST (Table 1), although again the discriminatory power of the fimHTR-fumC pairing was not significantly different from that of the other pairings.

[0103] However, another attractive feature of fumC that recommended it for pairing with fimHTR in the typing scheme is the fact that, of the 7 MLST loci, fumC demonstrated the best congruence with both ST profiles and major phylogenetic groups (Table 2). These relationships were measured by the Wallace index, which expresses the probability that paired strains assigned to the same genotype group by one method are also classified in the same type by the other method. The superior phylogenetic congruence of fumC is particularly important considering the congruence disrupting effect of the phylogenetically dispersed fimH alleles, as discussed above. Therefore, the fumC fimHTR combination were selected as the target loci for sequence typing and was designated as the CH (fumC fimH) typing scheme.

TABLE 2
Correspondence of individual MLST loci with full
ST profiles and phylogenetic groups of 191 diverse
E. coli isolates using the Wallace index.

| Locus | Wallace index for ST | Wallace index for phylogenetic group |
|---|---|---|
| adk | 0.462 | 0.800 |
| fumC | 0.548 | 0.986 |
| gyrB | 0.432 | 0.900 |
| icd | 0.437 | 0.944 |
| mdh | 0.328 | 0.959 |
| purA | 0.305 | 0.766 |
| recA | 0.459 | 0.892 |
| fimH_{TR} | 0.258 | 0.504 |

### Example 4

### Correlation Between MLST and CH Typing Among Current E. coli Isolates

[0104] To determine the resolution and specificity of CH typing in a field application, 853 fresh clinical E. coli isolates were analyzed. The isolates were collected consecutively as part of routine diagnostics in five different clinical microbiology labs, from October 2010 through January 2011, without any pre-selection criteria. All isolates were of extra-intestinal origin, primarily from urine. The MLST loci could be sequenced in all of the isolates tested, while fimHTR could be sequenced in more than 99% of the isolates (n=846).

[0105] In total, 210 unique MLST profiles (i.e., STs) were identified. Among them, 181 small STs each comprised <0.5% of the population (≦4 isolates; FIG. 3A), collectively accounting for 252 isolates (29.5%). Additionally, 24 medium STs each comprised 0.5 to 5% of the population (5 to 35 isolates in the collection), collectively accounting for 219 isolates (25.7%). Finally, 5 large STs each included more than 5% of the population (≦40 isolates in the collection) each, collectively accounting for 382 isolates (44.9%). Thus, while the number of individual STs decreased progressively along a gradient from small to large ST size, the greatest proportion of current isolates was accounted for by relatively few large STs, evidence of the highly clonal structure of clinical ExPEC isolates.

[0106] The current clinical isolates carried 143 unique fimHTR alleles. When fumC and fimHTR were combined for CH typing, there were a total of 246 unique CH types (CHTs), i.e., more than the number of 7-locus STs (see above). Similar to STs, the number of CHTs decreased significantly from small (209 CHTs) to medium (34 CHTs) to large (3 CHTs) (FIG. 3B). However, compared to STs, the absolute number of small and medium CHTs was somewhat greater, while the number of large CHTs was significantly lower. Likewise, whereas with MLST the aggregated large STs were most numerous, with CH typing the aggregated medium CHTs were most numerous, indicating that CH typing splits larger STs into smaller CHTs.

[0107] To determine to what extent unique CHTs correspond with MLST-based clonal groups, STs were combined into ST complexes by using the eBURST program (on the World Wide Web at eburst.mlst.net), where each ST must match at 6 of 7 loci with at least 1 other ST in the complex. Nearly half of the singleton STs (66 of 138) could be combined this way with another ST within the collection, with the rest remaining as individual STs; this yielded a total of 123 separate STs or ST complexes. Overall, 224 CHTs (i.e., >90% of the total) had a unique, specific match and another 3 CHTs were mostly (93 to 97%) matched to a single ST or ST complex. This gave an overall match rate between CH typing and MLST of 95.8%.

[0108] The overall superior resolution and the clonal matching of CH typing relative to MLST are illustrated in FIG. 4, where the 5 largest ST complexes (each represented by >5% of the isolates) are compared directly to the corresponding CHTs. These large ST complexes included such notorious ExPEC clones as ST131, ST73, ST95, ST69, and ST127 (FIG. 4, upper panel). Only in the ST69 complex was the number of CHTs less than the number of STs within the same complex. In the other 4 ST complexes, CHTs outnumbered the corresponding STs by 2- to 3-fold. Furthermore, within each complex, except the ST69 complex, the major (founder) ST was split into 4 to 15 different CHTs. For the large ST complexes, almost all CHTs were specific to that complex (FIG. 4), with an overall match rate of 98.8%.

[0109] Thus, among current ExPEC isolates, 2-locus CH typing provided discriminatory power superior to that of MLST while maintaining robust clonal correspondence with the MLST-based clonal groups.

[0110] The data above demonstrate a two-locus, sequence-based typing scheme for Escherichia coli that utilizes a 489-nucleotide internal fragment of fimH (encoding the type 1 fimbrial adhesin) and the 469-nt internal fumC fragment used in standard MLST. Based on sequence typing of 191 model commensal and pathogenic isolates plus 853 freshly isolated clinical E. coli strains, this 2-locus approach (termed here CH typing (fumC/fimH)) consistently yielded more haplotypes than standard 7-locus MLST, splitting large STs into multiple clonal subgroups and often distinguishing different within-ST eco- and pathotypes. Furthermore, specific CH profiles corresponded to specific STs, or ST complexes, with 95% accuracy, allowing excellent prediction of MLST-based profiles

### Example 5

### Major Clonotypes Dominate within E. coli Across Different Clinical Laboratories

[0111] A total of 222 distinct CH clonotypes were identified among 1,518 U.S.-based clinical E. coli isolates, comprising 1 to 137 isolates each (FIG. 5). Clonotypes consisting of a single isolate comprised only 7% of all isolates. Nineteen clonotypes that consisted of greater than or equal 15 isolates (i.e., greater than or equal to 1% of the collection) were defined as major (FIG. 5). Clonotype distribution was highly similar across laboratories (FIG. 5), with at least three of the four largest clonotypes overall predominating within each laboratory. The largest clonotype, both overall and at three of the five contributing laboratories, was CH40-30 from sequence type 131 (ST131).

[0112] Overall, 96 clonotypes were encountered in isolates from at least two different laboratories. In total, the common clonotypes comprised 89.6% of isolates, demonstrating a highly clonal structure of the vast majority of extraintestinal E. coli isolates, found across different geographic areas and patient populations.

### Example 6

### Antimicrobial Susceptibility Profiles of Clonotypes are Distinct and Consistent Across Different Locations

[0113] Within each of the 19 major clonotypes, the prevalence of resistance differed by greater than or equal to 2-fold (higher or lower) (P<0.05) from that of the rest of population for at least one antimicrobial (FIG. 6). Resistance prevalence within a clonotype did not correlate with the overall population prevalence of the clonotype; for example, among the most-prevalent clonotypes were several of the extensively resistant (e.g., CH40-30 and CH35-27) and the extensively susceptible (e.g., CH38-41 and CH14-2) clonotypes. For a given major clonotype, resistance patterns were highly consistent across laboratories, with only a few statistically significant interlaboratory differences (see FIG. 9 A to G).

### Example 7

### E. coli Clonal Typing Improves Prediction of Isolate Susceptibility to Antibiotics

[0114] Based on the greater than or equal to 80% susceptibility cutoff triage, CH-based typing allowed for treatment with a particular agent for widely divergent proportions of the isolates (Table 3). Among 5 oral antimicrobials that were most commonly used to treat E. coli infections in the data set, amoxicillin-clavulanate was allowed for 48.1% of isolates, cefazolin for 58%, trimethoprim-sulfamethoxazole for 58%, fluoroquinolones for 79.4%, and nitrofurantoin for 94.1%. In the allowed population, the actual prevalence of resistance to the corresponding antimicrobials ranged from 21.9% (ampicillin) to 3.74% (fluoroquinolones). The relative potential improvement in the prediction of susceptibility to a given agent with the clonotyping based approach, compared with the total observed susceptibility, ranged from 45.4% (cefazolin) to 78.1% (fluoroquinolones), with an average improvement of 57.4%.

TABLE 3
Performance statistics for clonotype-based susceptibility predictions
for the primary collection of clinical E. coli isolates^{a}

| | | Performance of clonotype-based choice | | |
|---|---|---|---|---|
| | Observed | of antimicrobial agent (%)^{c} | | |
| | Resistance rate | Rejected/ | Allowed/ | |
| Antibiotic^{b} | (%)^{d} | Resistance | Resistance | Improvement^{e} |
| AMP^{f} | 51.6 | 77.7/60.1 | 22.3/21.9 | 57.5 |
| TET^{f} | 29.5 | 49.4/48.0 | 50.6/11.5 | 61.1 |
| A/S^{f} | 29.4 | 66.2/37.9 | 33.8/13.0 | 55.9 |
| T/S | 26.9 | 42.0/50.1 | 58.0/10.1 | 62.4 |
| A/K | 25.5 | 51.9/36.5 | 48.1/13.5 | 46.8 |
| CZ | 19.7 | 42.0/32.0 | 58.0/10.7 | 45.4 |
| CIP | 17.1 | 20.6/68.7 | 79.4/3.7 | 78.1 |
| GM^{f} | 8.92 | 17.1/31.4 | 82.9/4.3 | 52.1 |
| NIT | 6.79 | 5.9/27.4 | 94.1/5.5 | 19.2 |
| CTR | 5.38 | 4.3/31.1 | 95.7/4.2 | 21.6 |
| PTZ | 3.96 | 2.1/13.3 | 97.9/3.8 | 5.1 |

^{a}A total of 1,518 isolates were typed using a fumC-fimH (CH) scheme and were tested against 11 antimicrobials. Of the isolates, 1,413 out of 1,518 belonged to CH clonotypes that contained >1 isolate (nonsingletons).
^{b}AMP, ampicillin; TET, tetracycline; A/S, ampicillin-sulbactam; T/S,
trimethoprimsulfamethoxazole; A/K, amoxicillin-clavulanate; CZ, cefazolin; CIP, ciprofloxacin; GM, gentamicin; NIT, nitrofurantoin; CTR, ceftriaxone; PTZ, piperacillin-tazobactam.
^{c}For each isolate, the treatment with an antimicrobial agent was allowed or not based on the prevalence of the susceptibility to this agent in the respective CH clonotype; to avoid bias, each analyzed isolate was excluded from the calculation of prevalence.
^{d}Rate (%) of resistant isolates among 1,413 isolates.
^{e}Percent improvement toward ideal test (100%) was calculated as (difference between the CH and antibiogram approach)/(difference between the antibiogram approach and 100%) × 100; all improvement rates were statistically significant (P < 0.001, Fisher's exact test), except for with NIT and CTR (P = 0.09) and PTZ (P = 0.43).
^{f}Antimicrobials with comparatively limited clinical utility.

### Example 8

### Clonotyping Predicts Antimicrobial Susceptibilities Across Different Locations

[0115] The clonotype-guided susceptibility prediction analyses for ciprofloxacin (a fluoroquinolone), which was prescribed in 40% of patients, and trimethoprim-sulfamethoxazole were done separately for the isolates from each clinical laboratory (Table 4), including for a set of 161 E. coli urine isolates from the University Clinics Hospital in Munster, Germany. To avoid potential self-selection bias in the analysis of these smaller groups, the susceptibility classification for the isolates in each subset was done after excluding the susceptibility profiles of that particular subset, i.e., by using the clonotype susceptibility profiles of the remaining isolates from common clonotypes (Table 4).

TABLE 4
Performance of clonotype-based susceptibility predictions compared to observed
susceptibility among clinical E. coli isolates from different laboratories

| | Clinical microbiology laboratory and associated performance (%)^{a} | | | | | |
|---|---|---|---|---|---|---|
| | Group | | | Harborview | | |
| Resistance and | Health | Children's | Univ. of | Med. | VA Med. | Univ. of |
| improvement rates | Co-op, | Hospital, | Washington, | Center, | Center, | Münster, |
| by antibiotic type^{b} | Seattle | Seattle | Seattle | Seattle | Minneapolis | Münster |

T/S

| | | | | | | |
|---|---|---|---|---|---|---|
| Total Resistant | 20.1 | 34.2 | 33.3 | 30.4 | 34.0 | 32.6 |
| Rejected/resistance | 48.8/36.2 | 41.9/58.7 | 43.5/62.6 | 45.6/58.3 | 50.0/51.9 | 56.6/46.6 |
| Allowed/resistance | 51.2/5.0 | 58.1/14.2 | 56.5/11.4 | 54.4/7.4 | 50.0/17.0 | 43.4/14.3 |
| Improvement^{c} | 72.9 | 49.7 | 65.7 | 75.8 | 50.0 | 56.1 |

CIP

| | | | | | | |
|---|---|---|---|---|---|---|
| Total Resistant | 13.7 | 10.0 | 21.5 | 31.2 | 35.1 | 30.2 |
| Rejected/resistance | 17.5/59.6 | 16.5/54.5 | 26.3/71.2 | 32.8/88.6 | 39.4/72.9 | 33.3/74.4 |
| Allowed/resistance | 82.5/4.1 | 83.5/1.4 | 73.7/3.6 | 67.2/3.6 | 60.6/7.0 | 66.7/8.14 |
| Improvement^{c} | 70.1 | 86.2 | 83.0 | 88.6 | 80.0 | 73.1 |

^{a}The set of isolates for which susceptibility was predicted was based on the mean susceptibility of the clonotype to which they belong. This mean susceptibility was calculated in each case for all isolates minus the isolates belonging to the validation set.
^{b}T/S, trimethoprim-sulfamethoxazole; CIP, ciprofloxacin.
^{c}Percent improvement was calculated as difference between resistance (i.e., potential drug-bug mismatch) in CH-allowed cases and observed resistance based on the actual susceptibility data (divided by the latter, ×100%); all improvements were statistically significant (P < 0.001, Fisher's exact test) unless stated otherwise.

[0116] Based on the greater than or equal to 80% susceptibility cutoff, CH-based typing rejected treatment with trimethoprim-sulfamethoxazole in 41.9 to 56.6% (mean, 47.7%) of the isolates, depending on the laboratory. Among the remaining allowed isolates, the actual prevalences of trimethoprim-sulfamethoxazole resistance were between 5.0% and 17.2% (mean, 12.1%), which was 2- to 4-fold lower than the overall resistance in the corresponding site. For ciprofloxacin, CH-based typing rejected treatment in 16.5 to 39.4% (mean, 27.6%) of the isolates. In the remaining allowed population, the actual prevalences of resistance to ciprofloxacin ranged from 8.1% to 1.4% (mean, 4.6%), which was 3- to 9-fold lower than the overall resistance prevalence.

### Example 9

### Association of UTI Persistence or Recurrence with Clonotypes and Drug-Bug Mismatch

[0117] For 1,034 urine isolates, follow-up patient data were available (see Table 5). More than 13% (n=135) of these patients experienced a persistent or recurrent UTI within 30 days. The overall clonal diversity of the isolates associated with persistent or recurrent UTI was significantly lower than that of the remaining isolates (P<0.001) (see Table 6). Thus, a relatively limited subset of CH-based clonotypes of E. coli has an enhanced propensity to cause persistent or recurrent UTIs. Indeed, one clonotype, CH40-30, predominated and was significantly overrepresented among patients with persistent or recurrent UTIs (FIG. 7) (OR, 3.7; P<0.001). Conversely, certain other clonotypes, including CH38-41 and CH13-5 (P<0.05), and possibly CH38-15 and CH24-10 (P<0.10), were negatively associated with persistence or recurrence of infection (FIG. 7).

[0118] The possible effects of drug-bug mismatch on persistence or recurrence of infection was assessed next. For this, actual clinical practices were analyzed for the subset of urine isolates (n=666) that were documented to have been treated empirically with only one antimicrobial agent prescribed at or around the day of the visit. The empirically prescribed agents (among the 666 patients with available data) were fluoroquinolones (267 [38%]), trimethoprim-sulfamethoxazole (TMP-SMX) (181 [25%]), first-generation cephalosporins (83 [11%]), third-generation cephalosporins (73 [10%]), nitrofurantoin (45 [6.4%]), penicillins (16 [2.3%]), and second-generation cephalosporins (11 [1.5%]), plus carbapenems, amoxicillin-clavulanate, ampicillin-sulbactam, tetracycline, and gentamicin (each <1%). Of these isolates, 99 (15%) were resistant to the empirically prescribed antimicrobial agent and 27% (27/99) of them were present in persistent or recurrent UTIs (FIG. 7) versus only 10.6% (60/567) of those whose isolate was susceptible to the initially prescribed agent (P<0.001).

TABLE 5
Description of the primary set of clinical E. coli isolates (2010-2011)

| | | | Median Patient | | # of isolates for analysis of: | | |
|---|---|---|---|---|---|---|---|
| | | | Age, yrs | Unique CH | Recurrence/ | | Antimicrobial |
| Center | Location | Isolates | (min, max) | clonotypes | Persitance | Sepsis | Therapy |
| Children's | Seattle, WA | 294 | 5 (3 d, 22) | 75 | 246 | 269 | 169 |
| Hospital | | | | | | | |
| University of | Seattle, WA | 200 | 49 (18, 94) | 70 | 154 | 158 | 103 |
| Washington | | | | | | | |
| Harborview | Seattle, WA | 143 | 58 (18, 92) | 63 | 111 | 135 | 48 |
| Med. Ctr. | | | | | | | |
| Group | Seattle, WA | 771 | 58 (18, 98) | 151 | 441 | 471 | 309 |
| Health Co-op | | | | | | | |
| VA Med. | Minneapolis | 110 | 68 (21, 98) | 46 | 82 | 100 | 47 |
| Ctr. | MN | | | | | | |
| TOTAL | | 1518 | 48 (3 d, 98) | 220 | 1034 | 1133 | 676 |

a Except when stated otherwise (i.e., d—days)
b Note that the data on recurrence/persistence for this set were available only for 666 isolates

TABLE 6
Clonotype diversity in relation to sepsis
and UTI recurrence/persistence

| | | | Diversity paramenters^{d} | |
|---|---|---|---|---|
| | # of strains | # of clonotypes | Simpson index^{b} | Alpha index^{c} |
| UTI | 135 | 54 | 0.072 ± 0.014 | 33 ± 4.6 |
| Recurrent/ | | | | |
| persistant^{a} | | | | |
| Single | 899 | 166 | 0.035 ± 0.002 | 60 ± 3.3 |
| Sepsis | 59 | 25 | 0.082 ± 0.015 | 16.4 ± 3.5 |
| No sepsis | 1074 | 188 | 0.035 ± 0.002 | 66 ± 11 |

^{a}Recurrence/persistence was analyzed for urine isolates, whereas sepsis was analyzed for all isolates
^{b}Simpson index here is the probability that any two isolates belong to the same clonotype; greater Simpson index indicates less diversity
^{c}Alpha index measures diversity based on alpha model which assumes that the abundance for each clonotype follows a Poisson distribution; lower alpha index indicates less diversity
^{d}Differences in diversity are statistically significant with P < .0001 for Alpha indexes and P = 0.012 and P = 0.002 for Simpson indexes for recurrence/persistence and sepsis, respectively

### Example 10

### Association of Clonotypes with Sepsis

[0119] Of the 1,518 primary set isolates, 1,133 were from patients with available clinical diagnostic data, of whom 59 were diagnosed with sepsis (see Table 5). The overall clonotype diversity of the 59 sepsis-associated isolates was significantly more limited than that of the 1,074 remaining isolates (P<0.001) (see Table 6), indicating that relatively few E. coli CH clonotypes are predisposed to cause bloodstream infections. Among the sepsis-associated isolates, the most prevalent clonotype was CH40-30 (17% of sepsis cases versus 8.9% of patients without sepsis; OR, 2.1) (P=0.04) (FIG. 7). Other clonotypes associated with sepsis were CH14-2 (13.3% versus 6.33%; OR, 2.3) (P=0.039) and, potentially, CH4-27 (5.1% versus 2.3%; OR, 2.3) (P=0.096) (see FIG. 7).

### Example 11

### Clonotype Identification Directly in Urine Specimens

[0120] It was determined whether clonotype information about E. coli could be determined directly in the patients' urine specimens by using common molecular diagnostics instruments, the LightCycler 2.0 (Roche Diagnostics GmbH) and PyroMark Q24 (Qiagen, Inc.), which utilize quantitative PCR (qPCR) and pyrosequencing approaches, respectively.

[0121] The qPCR diagnostic tests were based on gene-specific or SNP-specific probes, thus allowing for the detection of one clonotype in a single test run. Two probes capable of detecting the predominant CH40-30 clonotype were designed, one based on the rMST1 gene region and another on a canonical SNP in one of the CH clonotyping loci, fimH. The qPCR probes detected the infecting bacteria directly in the patients' urine specimens (FIGS. 8A and B) in all specimens containing the CH40-30 E. coli clonotype with a bacterial load of greater than or equal to 10⁴ per ml. By using qPCR, the clonotype identity was determined within 1 hour upon starting processing of a clinical specimen.

[0122] Unlike qPCR, pyrosequencing-based tests provide information about the nucleotide sequences of specific gene regions. Thus, this method allows for the detection of many different clonotypes in a single test run, depending on the sequence diversity of the target gene region. Test primers against short (<60 bp) highly polymorphic regions within the fumC and fimH loci were used and, as with qPCR, the clonotype identities of the bacterial isolates were determined directly in patient urine specimens. Illustrative results detecting bacteria identified as belonging to the CH40-30, CH35-27, and CH24-10 clonotypes are presented in FIGS. 8C, 8D and 8E, respectively. Different E. coli clonotypes were identified within the clinical specimens that had bacterial loads of greater than or equal to 10³ per ml. The pyrosequencing was accomplished generally within 3 hours upon the start of processing a clinical specimen.

[0123] The examples above demonstrate that splitting Escherichia coli species into clonal groups (clonotypes) predicts antimicrobial susceptibility or clinical outcome. A total of 1,679 E. coli isolates (collected from 2010 to 2012) were collected from one German and 5 U.S. clinical microbiology laboratories. Clonotype identity was determined by fumC and fimH(CH) sequencing. The associations of clonotype with antimicrobial susceptibility and clinical variables were evaluated. CH typing divided the isolates into >200 CH clonotypes, with 93% of the isolates belonging to clonotypes with >2 isolates. Antimicrobial susceptibility varied substantially among clonotypes, but was consistent across different locations. Clonotype-guided antimicrobial selection significantly reduced “drug-bug” mismatch compared to that which occurs with the use of conventional empirical therapy. With trimethoprim-sulfamethoxazole and fluoroquinolones, the drug-bug mismatch was predicted to decrease 62% and 78%, respectively. Recurrent or persistent urinary tract infection and clinical sepsis were significantly correlated with specific clonotypes, especially with CH40-30. Furthermore, the examples demonstrate the ability to clonotype directly from patient urine samples within 1 to 3 hours of obtaining the specimen. In E. coli, subspecies-level identification by clonotyping can be used to significantly improve empirical predictions of antimicrobial susceptibility and clinical outcomes in a timely manner.

[0124] By predicting antimicrobial resistant isolates, CH clonotyping can limit treatment failures due to drug-bug mismatch and therefore reduce the further spread of resistant organisms. The data demonstrate that antimicrobial selections that resulted in a drug-bug mismatch were correlated with persistent or recurrent UTIs (as well as sepsis), as were broadly resistant clonotypes, such as CH40-30, and multidrug-resistant isolates more generally. By reducing the likelihood of a drug-bug mismatch, the clonotyping-guided approach to antimicrobial selection has a strong potential to reduce the likelihood of persistent or recurrent infection.

[0125] CH clonotyping provides a significant diagnostic advantage of high-resolution over traditional MLST. This is especially evident from the characterization of the CH40-30 clonotype from ST131. CH40-30. In this study, the inventors show for the first time that in addition to its resistance associations, this clonotype is heavily associated with persistent or recurrent UTIs and urosepsis. This is in sharp contrast to other clonotypes of ST131 that combined comprise 35% of the clonal group in the sample used here and that are not particularly distinct from the rest of the E. coli isolates with respect to either resistance or virulence pattern. Thus, such novel information about these CH clonotypes is very useful for studying the epidemiology and pathogenic mechanisms underlying UTIs, as well as for diagnostic and therapeutic purposes.

[0126] The relative simplicity and rapid nature of the qPCR and pyrosequencing protocols allow for an easy incorporation into the current clinical microbiology protocols and normal workflow. Depending on the proximity of the laboratory to the point of care (or clinical specimen collection), the clonotype identity can be defined within 1 to 6 hours of the patient providing the specimen. Organizing a proper feedback mechanism from the laboratory to the provider allows the physician to make more-accurate antibiotic selections. This could be done either for the initial prescription, within hours of the patient visit, or on the next day to correct the original prescription if a drug-bug mismatch is predicted (e.g., CH40-30 with fluoroquinolones, or CH35-27 with TMP-SMZ). Even in the latter scenario, clonotyping provides a 24- to 48-hour advantage over conventional antibiogram diagnostics, especially for those clonotypes with highly predictable resistance patterns. The currently estimated reagent cost of a single clonotype-specific qPCR test (less than or equal to $2) and of a broad-range clonotype-specific pyrosequencing run (less than or equal to $8) are sufficiently low to consider introduction of clonotyping into clinical diagnostics and to encourage its refinement sequencing,

[0127] Subspecies clonotyping to the level provided by or comparable to that of CH clonotyping provides many advantages to current diagnostics and might result in a paradigm shift in the management of infections caused by E. coli and other clonal bacterial pathogens. First, it provides prognostic power of antimicrobial resistance. Second, it allows for the genetic typing of clinical isolates to facilitate in-depth epidemiologic analyses of various clonotypes' associations with specific clinical outcomes in relation to treatment regimens, comorbidities, and patient demographics. Third, since clonotyping profiles are based on short DNA sequences, they are discrete and portable, making them suitable for analysis across laboratories, thereby conceivably allowing for the creation of global databases that could be queried by remote users. Subspecies clonotyping of bacterial pathogens provides a fast and cost-effective approach in routine clinical diagnostics, rapidly supplying practitioners with potentially critical information about the infecting strain.

[0128] Unless the context clearly requires otherwise, throughout the description and the claims, the words ‘comprise’, ‘comprising’, and the like are to be construed in an inclusive sense as opposed to an exclusive or exhaustive sense; that is to say, in the sense of “including, but not limited to”. Words using the singular or plural number also include the plural and singular number, respectively. Additionally, the words “herein,” “above,” and “below” and words of similar import, when used in this application, shall refer to this application as a whole and not to any particular portions of the application.

[0129] While the invention has been particularly shown and described with reference to an aspect and various alternate aspects, it will be understood by persons skilled in the relevant art that various changes in form and details can be made therein without departing from the spirit and scope of the invention. The description of embodiments of the disclosure is not intended to be exhaustive or to limit the disclosure to the precise form disclosed. While the specific embodiments of, and examples for, the disclosure are described herein for illustrative purposes, various equivalent modifications are possible within the scope of the disclosure, as those skilled in the relevant art will recognize

[0130] All references, issued patents and patent applications cited within the body of the instant specification are hereby incorporated by reference in their entirety, for all purposes. Aspects of the disclosure can be modified, if necessary, to employ the systems, functions, and concepts of the above references and application to provide yet further embodiments of the disclosure. These and other changes can be made to the disclosure in light of the detailed description.

### REFERENCES

[0131] Achtman M, et al. 1983. Six widespread bacterial clones among Escherichia coli K1 isolates. Infect. Immun. 39:315-335.
[0132] Barl T, et al. 2008. Genotyping DNA chip for the simultaneous assessment of antibiotic resistance and pathogenic potential of extraintestinal pathogenic Escherichia coli. Int. J. Antimicrob. Agents 32:272-277.
[0133] Carriço J A, et al. 2006. Illustration of a common framework for relating multiple typing methods by application to macrolide-resistant Streptococcus pyogenes. J. Clin. Microbiol. 44:2524-2532.
[0134] Caugant D A, et al. 1983. Genetic diversity and relationships among strains of Escherichia coli in the intestine and those causing urinary tract infections. Prog. Allergy 33:203-227.
[0135] Caugant D A, et al. 1985. Genetic diversity in relation to serotype in Escherichia coli. Infect. Immun. 49:407-413.
[0136] Clermont O, Bonacorsi S, Bingen E. 2000. Rapid and simple determination of the Escherichia coli phylogenetic group. Appl. Environ. Microbiol. 66:4555-4558.
[0137] Connell I, et al. 1996. Type 1 fimbrial expression enhances Escherichia coli virulence for the urinary tract. Proc. Natl. Acad. Sci. U.S.A. 93:9827-9832.
[0138] Dias R C, Moreira B M, Riley L W. 2010. Use of fimH single-nucleotide polymorphisms for strain typing of clinical isolates of Escherichia coli for epidemiologic investigation. J. Clin. Microbiol. 48:483-488.
[0139] Edelstein M, Pimkin M, Palagin I, Edelstein I, Stratchounski L. 2003. Prevalence and molecular epidemiology of CTX-M extended-spectrum beta-lactamase-producing Escherichia coli and Klebsiella pneumoniae in Russian hospitals. Antimicrob. Agents Chemother. 47:3724-3732.
[0140] Filatov D A. 2002. ProSeq: a software for preparation and evolutionary analysis of DNA sequence data sets. Mol. Ecol. Notes 2:621-624.
[0141] Hommais F, et al. 2003. The FimH A27V mutation is pathoadaptive for urovirulence in Escherichia coli B2 phylogenetic group isolates. Infect. Immun 71:3619-3622.
[0142] Hunter P R, Gaston M A. 1988. Numerical index of the discriminatory ability of typing systems: an application of Simpson's index of diversity. J. Clin. Microbiol. 26:2465-2466.
[0143] Johnson J R, Delavari P, Kuskowski M, Stepll A L. 2001. Phylogenetic distribution of extraintestinal virulence-associated traits in Escherichia coli. J. Infect. Dis. 183:78-88.
[0144] Johnson J R, Delavari P, O'Bryan T T. 2001. Escherichia coli O18:K1:H7 isolates from patients with acute cystitis and neonatal meningitis exhibit common phylogenetic origins and virulence factor profiles. J. Infect. Dis. 183:425-434.
[0145] Johnson J R, et al. 2008. Virulence genotypes and phylogenetic background of Escherichia coli serogroup O6 isolates from humans, dogs, and cats. J. Clin. Microbiol. 46:417-422.
[0146] Johnson J R, Owens K L, Clabots C R, Weissman S J, Cannon S B. 2006. Phylogenetic relationships among clonal groups of extraintestinal pathogenic Escherichia coli as assessed by multi-locus sequence analysis. Microbes Infect. 8:1702-1713.
[0147] Johnson J R, Russo T A. 2002. Extraintestinal pathogenic Escherichia coli: “the other bad E. coli.” J. Lab. Clin. Med. 139:155-162.
[0148] Johnson J R, Stepll A L. 2000. Extended virulence genotypes of Escherichia coli strains from patients with urosepsis in relation to phylogeny and host compromise. J. Infect. Dis. 181:261-272.
[0149] Maiden M C, et al. 1998. Multilocus sequence typing: a portable approach to the identification of clones within populations of pathogenic microorganisms. Proc. Natl. Acad. Sci. U.S.A. 95:3140-3145.
[0150] Manges A R, et al. 2001. Widespread distribution of urinary tract infections caused by a multidrug-resistant Escherichia coli clonal group. N. Engl. J. Med. 345:1007-1013.
[0151] Mendonça N, Leitao J, Manageiro V, Ferreira E, Canica M. 2007. Spread of extended-spectrum beta-lactamase CTX-M-producing Escherichia coli clinical isolates in community and nosocomial environments in Portugal. Antimicrob. Agents Chemother. 51:1946-1955.
[0152] Nicolas-Chanoine M H, et al. 2008. Intercontinental emergence of Escherichia coli clone O25:H4-ST131 producing CTX-M-15. J. Antimicrob. Chemother. 61:273-281.
[0153] Nowrouzian F L, Friman V, Adlerberth I, Wold AE. 2007. Reduced phase switch capacity and functional adhesin expression of type 1-fimbriated Escherichia coli from immunoglobulin A-deficient individuals. Infect. Immun. 75:932-940.
[0154] Ochman H, Selander R K. 1984. Standard reference strains of Escherichia coli from natural populations. J. Bacteriol. 157:690-693.
[0155] Ronald L S, et al. 2008. Adaptive mutations in the signal peptide of the type 1 fimbrial adhesin of uropathogenic Escherichia coli. Proc. Natl. Acad. Sci. U.S.A. 105:10937-10942.
[0156] Sokurenko E V, et al. 2004. Selection footprint in the FimH adhesin shows pathoadaptive niche differentiation in Escherichia coli. Mol. Biol. Evol. 21:1373-1383.
[0157] Stentebjerg-Olesen B, Chakraborty T, Klemm P 1999. Type 1 fimbriation and phase switching in a natural Escherichia coli fimB null strain, Nissle 1917. J. Bacteriol. 181:7470-7478.
[0158] Struelens M J. 1996. Consensus guidelines for appropriate use and evaluation of microbial epidemiologic typing systems. Clin. Microbiol. Infect. 2:2-11.
[0159] Suzuki S, et al. 2009. Change in the prevalence of extended-spectrumbeta-lactamase-producing Escherichia coli in Japan by clonal spread. J. Antimicrob. Chemother. 63:72-79.
[0160] Swofford D L. 2003. PAUP*: phylogenetic analysis using parsimony (* and other methods), version 4. Sinauer Associates, Sunderland, Mass.
[0161] Tamura K, Dudley J, Nei M, Kumar S. 2007. MEGA4: molecular evolutionary genetics analysis (MEGA) software version 4.0. Mol. Biol. Evol. 24:1596-1599.
[0162] Tartof S Y, Solberg O D, Riley L W. 2007. Genotypic analyses of uropathogenic Escherichia coli based on fimH single nucleotide polymorphisms (SNPs). J. Med. Microbiol. 56:1363-1369.
[0163] Tenover F C, et al. 1995. Interpreting chromosomal DNA restriction patterns produced by pulsed-field gel electrophoresis: criteria for bacterial strain typing. J. Clin. Microbiol. 33:2233-2239.
[0164] Touchon M, et al. 2009. Organised genome dynamics in the Escherichia coli species results in highly diverse adaptive paths. PLoS Genet. 5:e1000344.
[0165] Vejborg R M, Friis C, Hancock V, Schembri M A, Klemm P 2010. A virulent parent with probiotic progeny: comparative genomics of Escherichia coli strains CFT073, Nissle 1917 and ABU 83972. Mol. Genet. Genomics 283:469-484.
[0166] Weissman S J, et al. 2007. Differential stability and trade-off effects of pathoadaptive mutations in the Escherichia coli FimH adhesin. Infect. Immun 75:3548-3555.
[0167] Weissman S J, et al. 2006. Clonal analysis reveals high rate of structural mutations in fimbrial adhesins of extraintestinal pathogenic Escherichia coli. Mol. Microbiol. 59:975-988.
[0168] Wirth T, et al. 2006. Sex and virulence in Escherichia coli: an evolutionary perspective. Mol. Microbiol. 60:1136-1151.

1. A method of typing Escherichia coli in a sample comprising:
(a) determining a nucleic acid sequence in the sample of Escherichia coli (E. coli) type 1 fimbrial adhesion (fimH) gene and a further E. coli gene selected from the group consisting of fumC, adk, gyrB, icd, mdh, purA, and recA to identify a clonotype of the sample; and
(b) typing E. coli present in the sample based on the clonotype.

2. The method of claim 1, wherein the sample is a biological sample from a subject, and wherein the typing indicates presence of antibiotic resistant E. coli in the subject, or is used to diagnose or prognose a disease state in the subject.

3. The method of claim 2, wherein the typing indicates that the subject is infected with antibiotic resistant E. coli.

4. The method of claim 2, wherein the subject is at risk of having a urinary tract infection, and wherein the typing is used to diagnose a urinary tract infection in the subject.

5. The method of claim 2, wherein the subject is at risk of having sepsis, and wherein the typing is used to diagnose sepsis in the subject.

6. The method of claim 2, wherein the subject has a urinary tract infection, and wherein the typing is used to prognose the urinary tract infection in the subject.

7. The method of claim 2, wherein the subject has sepsis, and wherein the typing is used to prognose the sepsis in the subject.

8. The method of claim 3, wherein the typing indicates efficacy of an antibiotic treatment for the subject.

9. The method of claim 8, wherein the typing indicates efficacy of ampicillin (AMP), tetracycline (TET), ampicillin-sulbactam (A/S), trimethoprimsulfamethoxazole (T/S), amoxicillin-clavulanate (A/K), cefazolin (CZ), ciprofloxacin (CIP), gentamicin (GM), nitrofurantoin (NIT), ceftriaxone (CTR) and/or piperacillin-tazobactam (PTZ) in the subject.

10. The method of claim 2, wherein the typing is carried out after the subject has undergone treatment for the disease state or the infection with antibiotic resistant E. coli, and wherein the typing indicates efficacy of the treatment.

11. The method of claim 2, wherein the biological sample is selected from the group consisting of urine, blood, wound, tissue, saliva, sputum, feces, spinal fluid, plasma, peritoneal fluid, ascites, pleural fluid, joint fluid, abscess material, pus, tracheal secretions, bile, exudate, corneal scraping, bone, drainage and biopsy material.

12. The method of claim 2, wherein the biological sample is urine.

13. The method of claim 1, wherein the further E. coli gene is fumC.

14. The method of claim 1, wherein determining the fimH gene nucleic acid sequence comprises amplifying and determining a sequence of a portion of the fimH gene, wherein the portion of the fimH gene is amplified by an oligonucleotide primer pair consisting of 5′-CACTCAGGGAACCATTCAGGCA-3′ (SEQ ID NO: 01) and 5′-CTTATTGATAAACAAAAGTCAC-3′ (SEQ ID NO: 02).

15. The method of claim 14, wherein determining the fumC gene nucleic acid sequence comprises amplifying and determining a sequence of a portion of the fumC gene, wherein the portion of the fumC gene is amplified by an oligonucleotide primer pair that amplifies a fumC fragment of 500 nucleotides or less.

16. The method of claim 1, wherein determining the nucleic acid sequences comprises quantitative polymerase chain reaction (qPCR).

17. A composition consisting of between 2-5 oligonucleotide primer pairs, wherein:
(a) a first primer pair selectively amplifies a region of a fimH gene; and
(b) a second primer pair selectively amplifies a region of a gene selected from the group consisting of fumC, adk, gyrB, icd, mdh, purA, and recA.

18. The composition of claim 17, wherein the first primer pair consists of 5′-CACTCAGGGAACCATTCAGGCA-3′ (SEQ ID NO: 01) and 5′-CTTATTGATAAACAAAAGTCAC-3′ (SEQ ID NO: 02).

The application's sequence listing, which the Patent Office published only in electronic form, follows.

SEQUENCE LISTING (854 sequences)

SEQ ID NO: 1 - DNA, 22 bp, Artificial sequence
  Artificial oligonucleotide
cactcagggaaccattcaggca

SEQ ID NO: 2 - DNA, 22 bp, Artificial sequence
  Artificial oligonucleotide
cttattgataaacaaaagtcac

SEQ ID NO: 3 - DNA, 18 bp, Artificial sequence
  Artificial oligonucleotide
cgttgtttataattcgag

SEQ ID NO: 4 - DNA, 900 bp, Escherichia coli
atgaaacgagttattaccctgtttgctgtactgctgatgggctggtcggtaaatgcctggtcattcgcctgtaaaaccgccaatggtactgctatccctattggcggtggcagcgccaatgtttatgtaaaccttgcgcctgccgtgaatgtggggcaaaacctggtcgtggatctttcgacgcaaatcttttgccataacgattacccggaaaccattacagactatgtcacactgcaacgaggttcggcttatggcggcgtgttatctagtttttccgggaccgtaaaatataatggcagtagctatcctttccctactaccagcgaaacgccgcgggttgtttataattcgagaacggataagccgtggccggtggcgctttatttgacgcctgtgagcagtgctggcggggtggcgattaaagctggttcattaattgccgtgcttattttgcgacagaccaacaactataacagcgatgattttcagtttgtgtggaatatttacgccaataatgatgtggtggtgcccactggcggctgtgatgtttctgctcgtgatgtcaccgttactctgccggactaccctggttcagtgccgattcctcttaccgtttattgtgcgaaaagccaaaacctggggtattacctctccggcacaaccgcagatgcgggcaactcgattttcaccaataccgcgtcgttttcacccgcgcagggcgtcggcgtacagttgacgcgcaacggtacgattattccagcgaataacacggtatcgttaggagcagtagggacttcggcggtaagtctgggattaacggcaaattacgcacgtaccggagggcaggtgactgcagggaatgtgcaatcgattattggcgtgacttttgtttatcaa

SEQ ID NO: 5 - DNA, 469 bp, Escherichia coli
cgagcgccattcggcaggcggcggatgaagtactggcaggacagcatgacgacgaattcccgctggctatctggcagaccggctccggcacgcaaagtaacatgaacatgaacgaagtgctggctaaccgggccagtgaattactcggcggcgtgcgcgggatggaacgtaaagttcaccctaacgacgacgtgaacaaaagccaaagttccaacgatgtctttccgacggcgatgcacgttgcggcgctgctggcgctgcgcaagcaactcattccgcagcttaaaaccctgacacagacactgagtgaaaaatcgcgtgcatttgccgatatcgtcaaaatcggtcgaacccacttgcaggacgccacgccgctaacactagggcaggagatttccggctgggtagcgatgctcgagcataatctcaaacatatcgaatacagcctgcctcacgtagcggaactggc

SEQ ID NO: 6 - DNA, 536 bp, Escherichia coli
ggggaaagggactcaggctcagttcatcatggagaaatatggtattccgcaaatctccactggcgatatgctgcgtgctgcggtcaaatctggctccgagctgggtaaacaagcaaaagacattatggatgctggcaaactggtcaccgacgaactggtgatcgcgctggttaaagagcgcattgctcaggaagactgccgtaatggtttcctgttggacggcttcccgcgtaccattccgcaggcagacgcgatgaaagaagcgggcatcaatgttgattacgttctggaattcgacgtaccggacgaactgattgttgatcgtatcgtaggccgccgcgttcatgcgccgtctggtcgtgtttatcacgttaaattcaatccgccgaaagtagaaggcaaagacgacgttaccggtgaagaactgactacccgtaaagacgatcaggaagaaaccgtgcgtaaacgtctggttgaataccatcagatgactgcaccgctgatcggctactactccaaagaagcggaagcgggta

SEQ ID NO: 7 - DNA, 522 bp, Escherichia coli
atgaccgttctgcacgcaggcggtaaatttgacgataactcctataaagtgtccggcggtctgcacggcgttggtgtttcggtagtaaacgccctgtcgcaaaaactggagctggttatccagcgcgagggtaaaattcaccgtcagatctacgaacacggtgtaccgcaggctccgctggcggttaccggcgagactgaaaaaaccggcaccatggtgcgtttctggcccagcctcgaaaccttcaccaatgtgaccgagttcgaatatgaaattctggcgaaacgtctgcgtgagttgtcgttcctcaactccggcgtttccattcgtttgcgcgacaagcgtgacggcaaagaagaccacttccactatgaaggcggcatcaaggcgttcgttgaatatctgaacaagaacaaaacgccgatccatccgaatatcttctacttctccaccgaaaaagacggtattggcgtcgaagtggcgttgcagtggaacgatggcttccaggaaaacatctactgc

SEQ ID NO: 8 - DNA, 1166 bp, Escherichia coli
accctgcaaaacggcaaactcaacgttcctgaaaatccgattatcccttacattgaaggtgatggaatcggtgtagatgtaaccccagccatgctgaaagtggtcgacgctgcagtcgagaaagcctataaaggcgagcgtaaaatctcctggatggaaatttacaccggtgaaaaatccacacaggtttatggtcaggatgtctggctgcctgctgaaacccttgatctgattcgtgaatatcgcgttgccattaaaggtccgctgaccactcctgttggtggcggtattcgctctctgaacgttgccctgcgccaggaactggatctctacatctgcctgcgtccggtacgttactatcagggcactccaagcccggttaaacaccctgaactgaccgatatggttatcttccgtgaaaactcggaagacatttatgcgggtatcgaatggaaagcagactctgccgacgccgagaaagtgattaaattcctgcgtgaagagatgggggtgaagaaaattcgcttcccggaacattgtggtatcggtattaagccgtgttcggaagaaggcaccaaacgtctggttcgtgcagcgatcgaatacgcaattgctaacgatcgtgactctgtgactctggtgcacaaaggcaacatcatgaagttcaccgaaggcgcgtttaaagactggggctaccagctggcgcgtgaagagtttggcggtgaactgatcgacggcggcccgtggctgaaagttaaaaacccgaacaccggcaaagagatcgtcattaaagacgtgattgctgatgcattcctgcaacaaatcctgctgcgtccggctgaatatgatgttatcgcctgtatgaacctgaacggtgactacatttctgacgctctggcagcgcaggttggcggtatcggtatcgcccctggagcaaacatcggtgacgaatgcgccctgtttgaagccacccccggtactgcgccgaaatacgccggtcaggacaaagtaaaccctggctctattattctctccgctgagatgatgttacgccatatgggttggactgaagcggctgacctgattgttaaaggtatggaaggcgcaatcaatgccaagaccgtaacctatgacttcgaacgtctgatggaaggcgctaaactgct

SEQ ID NO: 9 - DNA, 549 bp, Escherichia coli
ggtgaagatgcgactccggcgctggaaggcgcagatgtcgttcttatctctgcaggtgtagcgcgtaaaccgggtatggatcgttccgacctgtttaacgttaacgccggcatcgtgaaaaacctggtacagcaagttgcgaaaacctgcccgaaagcgtgcattggtattatcactaacccggttaacaccacagttgcaattgctgctgaagtgctgaaaaaagccggtgtttatgacaaaaacaaactgttcggcgttaccacgctggatatcattcgttccaacacctttgttgcggaactgaaaggcaaacagccaggcgaagttgaagtgccggttattggcggtcactctggtgttaccattctgccgctgctgtcacaggttcctggcgttagttttaccgagcaggaagtggctgatctgaccaaacgtatccagaacgcgggtactgaggtggttgaagcgaaagccggtggcgggtctgcaaccctgtctatgggccaggcagctgcacgttttggtctgtctctggttcgtgcactg

SEQ ID NO: 10 - DNA, 638 bp, Escherichia coli
tccgaagcatgtccgctgatccttgattatcacgttgcgctggataacgcgcgtgagaaagcgcgtggcgcgaaagcgatcggcaccaccggtcgtggtatcgggcctgcttatgaagataaagtggcacgtcgcggtctgcgtgttggcgaccttttcgacaaagaaaccttcgctgaaaaactgaaagaagtgatggaatatcacaacttccagttggttaactactacaaagctgaagcggttgattaccagaaagttctggatgatacgatggctgttgccgacatcctgacttctatggtggttgacgtttctgacctgctcgaccaggcgcgtcagcgtggcgatttcgtcatgtttgaaggtgcgcagggtacgctgctggatatcgaccacggtacttatccgtacgtaacttcttccaacaccactgctggtggcgtggcgaccggttccggcctgggcccgcgttatgttgattacgttctgggtatcctcaaagcttactccactcgtgtgggtgcaggtccgttcccgactgaactgtttgatgaaactggcgagttcctctgcaagcagggtaacgaattcggcgcaactacgggtcgtcgtcgtcgtaccggctggctggacac

SEQ ID NO: 11 - DNA, 510 bp, Escherichia coli
cgcacgtaaactgggcgtcgatatcgataacctgctgtgctcccagccggacaccggcgagcaggcactggaaatctgtgacgccctggcgcgttctggcgcagtagacgttatcgtcgttgactccgtggcggcactgacgccgaaagcggaaatcgaaggcgaaatcggcgactctcacatgggccttgcggcacgtatgatgagccaggcgatgcgtaagctggcgggtaacctgaagcagtccaacacgctgctgatcttcatcaaccagatccgtatgaaaattggtgtgatgttcggtaacccggaaaccactaccggtggtaacgcgctgaaattctacgcctctgttcgtctcgacatccgtcgtatcggcgcggtgaaagagggcgaaaacgtggtgggtagcgaaacccgcgtgaaagtggtgaagaacaaaatcgctgcaccgtttaaacaggctgaatttcagatcctctacggcgaaggtatcaacttctacggcga

SEQ ID NO: 12 - DNA, 469 bp, Escherichia coli
cgagcgccattcggcaggcggcggatgaagtactggcaggacagcatgacgacgaattcccgctggctatctggcagaccggctccggcacgcaaagtaacatgaatatgaacgaagtgctggctaaccgggccagtgaattactcggtggcgtgcgcgggatggaacgtaaagttcaccctaacgacgacgtgaacaaaagccaaagttccaacgatgtctttccgacggcgatgcacgttgcggcactactggcgctgcgcaagcaactcattccacaacttaaaaccctgacccagacgctgagtgaaaaatcccgcgcatttgctgatatcgtcaaaatcggtcgtacccacttgcaggacgccacgccgttaacgctggggcaggagatttccggctgggtagcgatgctggagcataatctcaaacatatcgaatacagcctgcctcacgtagcggaactggc

SEQ ID NO: 13 - DNA, 489 bp, Escherichia coli
ttcgcctgtaaaaccgccaatggtaccgctattcctattggcggtggcagcgctaatgtttatgtaaaccttgcgcctgccgtgaatgtggggcaaaacctggtcgtagatctttcgacgcaaatcttttgccataacgattatccggaaaccattacagactatgtcacactgcaacgaggctcggcttatggcggcgtgttatctaatttttccgggaccgtaaaatatagtggcagtagctatccatttccgactaccagcgaaacgccgcgggttgtttataattcgagaacggataagccgtggccggtggcgctttatttgacgcctgtgagcagtgcgggtggggtggcgattaaagctggctcattaattgccgtgcttattttgcgacagaccaacaactataacagcgatgatttccagtttgtgtggaatatttacgccaataatgatgtggtggtgcctactggcggctgcgatgtt

SEQ ID NO: 14 - DNA, 469 bp, Escherichia coli; identical to SEQ ID NO: 5

SEQ ID NO: 15 - DNA, 489 bp, Escherichia coli
ttcgcctgtaaaaccgccaatggtaccgctatccctattggcggtggcagcgccaatgtttatgtaaaccttgcgcccgtcgtgaatgtggggcaaaacctggtcgtggatctttcgacgcaaatcttttgccataacgattatccggaaaccattacagactatgtcacactgcaacgaggctcggcttatggcggcgtgttatctaatttttccgggaccgtaaaatatagtggcagtagctatccatttcctaccaccagcgaaacgccgcgcgttgtttataattcgagaacggataagccgtggccggtggcgctttatttgacgcctgtgagcagtgcgggcggggtggcgattaaagctggctcattaattgccgtgcttattttgcgacagaccaacaactataacagcgatgatttccagtttgtgtggaatatttacgccaataatgatgtggtggtgcctactggcggctgcgatgtt

SEQ ID NO: 16 - DNA, 469 bp, Escherichia coli
cgagcgccattcggcaggcggcggatgaagtactggcaggacagcatgacgacgaattcccattggctatctggcagaccggctccggcacgcaaagtaacatgaacatgaacgaagtgctggctaaccgggccagtgaattactcggcggcgtgcgtgggatggagcgtaaagttcaccctaacgacgacgtgaacaaaagccaaagttctaacgatgtctttccaacggcgatgcacgttgcggcgctgctggcgctgcgcaagcaactcattccgcagcttaaaaccctgacacagacgctgagtgaaaaatcccgtgcatttgccgatatcgtaaaaatcggtcgaacccacttgcaggacgccacgccgctaacactggggcaggagatttccggctgggtagcgatgctcgagcataatctcaaacatattgaatacagcctgcctcacgtagcggaactggc

SEQ ID NO: 17 - DNA, 489 bp, Escherichia coli
ttcgcctgtaaaaccgccaatggtaccgctatccctattggcggtggcagcgccaatgtttatgtaaaccttgcgcctgccgtgaatgtggggcaaaacctggtcgtggatctttcgacgcaaatcttttgccataacgattacccggaaaccattacagactatgtcacactgcaacgaggttcggcttatggcggcgtgttatctagtttttccgggaccgtaaaatataatggcagtagctatcctttccctactaccagcgaaacgccgcgggttgtttataattcgagaacggataagccgtggccggtggcgctttatttgacgcctgtgagcagtgcggggggagtggcgattaaagcaggctcattaattgccgtgcttattttgcgacagaccaacaactataacagcgatgatttccagtttgtgtggaatatttacgccaataatgatgtggtggtgcccactggcggctgcgatgtt

SEQ ID NO: 18 - DNA, 469 bp, Escherichia coli
cgagcgccattcgtcaggcggcggatgaagtactggcaggacagcatgacgacgaattcccgctggctatctggcagaccggctccggcacgcaaagtaacatgaacatgaacgaagtgctggctaaccgggccagtgaattactcggcggtgtgcgcgggatggaacgtaaagttcaccctaacgacgacgtgaacaaaagccaaagttccaacgatgtctttccgacggcgatgcacgttgcggcgctgctggcgctgcgcaagcaactcattcctcagcttaaaaccctgacacagacactgaatgagaaatcccgtgcttttgccgatatcgtcaaaattggtcgtactcacttgcaggatgccacgccgttaacgctggggcaggagatttccggctgggtagcgatgctcgagcataatctcaaacatatcgaatacagcctgcctcacgtagcggaactggc

SEQ ID NO: 19 - DNA, 489 bp, Escherichia coli
ttcgcctgtaaaaccgccaatggcaccgctatccctattggcggtggcagcgccaatgtttatgtaaaccttgcgcccgccgtgaatgtggggcaaaacctggtcgtggatctttcgacgcaaatcttttgccataacgattacccggaaaccattacagattatgtcacactgcaacgaggctcggcttatggcggcgtgttatctaatttttccgggaccgtaaaatatagtggcagtagctatccatttccgaccaccagtgaaacgccgcgggttgtttataattcgagaacggataagccgtggccggtggcgctttatttgacgcctgtgagcagtgcgggcggggtggtgattaaagctggctcattaattgccgtgcttattttgcgacagaccaacaactataacagcgatgatttccagtttgtgtggaatatttacgccaataatgatgtggtggtgcccactggcggctgcgatgtt

SEQ ID NO: 20 - DNA, 489 bp, Escherichia coli
ttcgcctgtaaaaccgccaatggtacagctatccctattggcggtggcagcgctaatgtttatgtaaaccttgcgcccgccgtgaatgtggggcaaaacctggtcgtagatctttcgacgcaaatcttttgccataacgattatccggaaaccattacagactatgtcacactgcaacgaggctcggcttatggcggcgtgttatctaatttttccgggaccgtaaaatatagtggcagtagctatccatttcctaccaccagcgaaacgccgcgcgttgtttataattcgagaacggataagccgtggccggtggcgctttatttgacgcctgtgagcagtgcgggcggggtggcgattaaagctggctcattaattgccgtgcttattttgcgacagaccaacaactataacagcgatgatttccagtttgtgtggaatatttacgccaataatgatgtggtggtgcccactggcggctgtgatgtt

SEQ ID NO: 21 - DNA, 469 bp, Escherichia coli
cgagcgccattcggcaggcggcggatgaagtactggcaggacagcatgacgacgaattcccattggctatctggcagactggctccggcacgcaaagtaacatgaacatgaacgaagtgctggctaaccgggccagtgaattactcggcggcgtgcgtgggatggagcgtaaagttcaccctaacgacgacgtgaacaaaagccaaagttctaacgatgtctttccaacggcgatgcacgttgcggcgctgctggcgctgcgcaagcaactcattccgcagcttaaaaccctgacacagacgctgagtgaaaaatcgcgtgcatttgccgatatcgtaaaaatcggtcgaacccacttgcaggacgccacgccgctaacactggggcaggagatttccggctgggtagcgatgctcgagcataatctcaaacatattgaatacagcctgcctcacgtagcggaactggc

SEQ ID NO: 22 - DNA, 469 bp, Escherichia coli
cgagcgccattcggcaggcggcggatgaagtactggcaggacagcatgacgacgaattcccgctggctatctggcagaccggctccggcacgcaaagtaacatgaacatgaacgaagtgttggctaaccgggccagtgaattactcggcggcgtgcgcgggatggaacgtaaagttcaccctaacgacgacgtgaacaaaagccaaagttccaacgatgtctttccgacggcgatgcacgttgcggcactactggcgctgcgcaagcaactcattccacaacttaaaaccctgacccagacgctgagtgaaaaatcccgcgcatttgccgatatcgtcaaaatcggtcgtacccacttgcaggacgcgacgccgttaacactggggcaggagatttccggctgggtagcgatgctggagcataatctcaaacatatcgaatacagcctgcctcacgtaacggaactggc

SEQ ID NO: 23 - DNA, 469 bp, Escherichia coli
cgagcgccattcggcaggcggcggatgaagtactggcaggacagcatgacgacgaattcccgttggctatctggcagaccggctccggcacgcaaagtaacatgaacatgaacgaagtgctggctaaccgggccagtgaattactcggcggcgtgcgcgggatggaacgtaaagttcaccctaacgacgacgtgaacaaaagccaaagttccaacgatgtctttccgacggcgatgcacgttgcggcgctgctggcgctgcgcaagcaactcattccacaacttaaaaccctgacccagacgctgagtgaaaaatcccgcgcatttgccgatatcgtcaaaatcggtcgtacccacttgcaggacgccacgccgttaacgctggggcaggagatttccggctgggtagcgatgctggagcataatctcaaacatatcgaatacagcctgcctcacgtagcggaactggc

SEQ ID NO: 24 - DNA, 489 bp, Escherichia coli
ttcgcctgtaaaaccgccaatggtaccgcaatccctattggcggtggcagcgccaatgtttatgtaaaccttgcgcctgccgtgaatgtggggcaaaacctggtcgtagatctttcgacgcaaatcttttgccataacgattacccagaaaccattacagactatgtcacactgcaacgaggttcggcttatggcggcgtgttatctagtttttccgggaccgtaaaatataatggcagtagctatcctttccctactaccagcgaaacgccgcgggttgtttataattcgagaacggataagccgtggccggtggcgctttatttgacgccggtgagcagtgcggggggagtggcgattaaagctggctcattaattgccgtgcttattttgcgacagaccaacaactataacagcgatgatttccagtttgtgtggaatatttacgccaataatgatgtggtggtgcccactggcggctgtgatgct

SEQ ID NO: 25 - DNA, 489 bp, Escherichia coli
ttcgcctgtaaaaccgccaatggtaccgcaatccctattggcggtggcagcgccaatgtttatgtaaaccttgcgcctgccgtgaatgtggggcaaaacctggtcgtggatctttcgacgcaaatcttttgccataacgattacccggaaaccattacagattatgtcacactgcaacgaggctcggcttatggcggcgtgttatctaatttttccgggaccgtaaaatataatggcagtagctatcctttccctactaccagcgaaacgccgcgggttgtttataattcgagaacggataagccgtggccggtggcgctttatttgacgcctgtgagcagtgcggggggagtggcgattaaagctggctcattaattgccgtgctaattttgcgacagaccaacaactataacagcgatgatttccagtttgtgtggaatatttacgccaataatgatgtggtggtgcctactggcggctgtgatgtt

SEQ ID NO: 26 - DNA, 469 bp, Escherichia coli
cgagcgccattcggcaggcggcggatgaagtactggcaggacagcatgacgacgaattcccgctggctatctggcagaccggctccggcacgcaaagtaacatgaacatgaatgaagtgctggctaaccgggccagtgaattactcggcggcgtgcgcgggatggaacgtaaagttcaccctaacgacgacgtgaacaaaagccaaagttccaacgatgtctttccgacggcgatgcacgttgcggcactactggcgctgcgcaagcaactcattccacaacttaaaaccctgacccagacgctgagtgaaaaatcccgcgcatttgccgatatcgtcaaaatcggtcgtacccacttgcaggacgcgacgccgttaacgctggggcaggagatttccggctgggtagcgatgctggagcataatctcaaacatatcgaatacagcctgcctcacgtagcggaactggc

SEQ ID NO: 27 - DNA, 469 bp, Escherichia coli
cgagcgccattcggcaggcggcggatgaagtactggcaggacagcatgacgacgaattcccgctggctatctggcagaccggctccggcacgcaaagtaacatgaacatgaacgaagtgctggctaaccgggccagtgaattactcggcggcgtgcgcgggatggaacgtaaagttcaccctaacgacgacgtgaacaaaagccaaagttccaacgatgtctttccgacggcgatgcacgttgcggcgctgctggcgctgcgcaagcaactcattccacaacttaaaaccctgacccagacgctgagtgaaaaatcccgcgcatttgccgatatcgtcaaaatcggtcgtacccacttgcaggacgccacgccgttaacgctggggcaggagatttccggctgggtagcgatgctggagcataatctcaaacatatcgaatacagcctgcctcacgtagcggaactggc

SEQ ID NO: 28 - DNA, 489 bp, Escherichia coli
ttcgcctgtaaaaccgccaatggtaccgcaatccctattggcggtggcagcgccaatgtttatgtaaaccttgcgcctgccgtgaatgtggggcaaaacctggtcgtggatctttcgacgcaaatcttttgccataacgattacccggaaaccattacagattatgtcacactgcaacgaggctcggcttatggtggcgtgttatctaatttttccgggaccgtaaaatataatggcagtagctatcctttccctactaccagcgaaacgccgcgggttgtttataattcgagaacggataagccgtggccggtggcgctttatttgacgcctgtgagcagtgcggggggagtggcgattaaagctggctcattaattgccgtgcttattttgcgacagaccaacaactataacagcgatgatttccagtttgtgtggaatatttacgccaataatgatgtggtggtgcccactggcggctgcgatgtt

SEQ ID NO: 29 - DNA, 489 bp, Escherichia coli
ttcgcctgtaaaaccgccaatggtaccgcaatccctattggcggtggcagcgccaatgtttatgtaaaccttgcgcctgccgtgaatgtggggcaaaacctggtcgtagatctttcgacgcaaatcttttgccataacgattacccagaaaccattacagactatgtcacactgcaacgaggttcggcttatggcggcgtgttatctagtttttccgggaccgtaaaatataatggcagtagctatcctttccctactaccagcgaaacgccgcgggttgtttataattcgagaacggataagccgtggccggtggcgctttatttgacgccggtgagcagtgcggggggagtggcgattaaagctggctcattaattgccgtgcttattttgcgacagaccaacaactataacagcgatgatttccagtttgtgtggaatatttacgccaataatgatgtggtggtgcccactggcggctgtgatgtt

SEQ ID NO: 30 - DNA, 489 bp, Escherichia coli
ttcgcctgtaaaaccgccaatggtaccgctatccctattggcggtggcagcgccaatgtttatgtaaaccttgcgcctgccgtgaatgtggggcaaaacctggtcgtggatctttcgacgcaaatcttttgccataacgattacccggaaaccattacagactatgtcacactgcaacgaggttcggcttatggcggcgtgttatctagtttttccgggaccgtaaaatataatggcagtagctatcctttccctactaccagcgaaacgccgcgggttgtttataattcgagaacggataagccgtggccggtggcgctttatttgacgcctgtgagcagtgcggggggagtggcgattaaagctggctcattaattgccgtgcttattttgcgacagaccaacaactataacagcgatgatttccagtttgtgtggaatatttacgccaataatgatgtggtggtgcccactggcggctgtgatgtt

SEQ ID NO: 31 - DNA, 489 bp, Escherichia coli
ttcgcctgtaaaaccgccaatggtaccgcaatccctattggcggtggcagcgccaatgtttatgtaaaccttgcgcctgccgtgaatgtggggcaaaacctggtcgtagatctttcgacgcaaatcttttgccataacgattacccagaaaccattacagactatgtcacactgcaacgaggttcggcttatggcggcgtgttatctagtttttccgggaccgtaaaatataatggcagtagctatcctttccctactaccagcgaaacgccgcgggttgtttataattcgagaacggataagccgtggccggtggcgctttatttgacgccggtgagcagtgcggggggagtggcgattaaagctggctcattaattgccgtgcttattttgcgacagaccaacaactataacagcgatgatttccagtttgtgtggaatatttacgccaataatgatgtggtggtgcccactggcggctgcgatgtt

SEQ ID NO: 32 - DNA, 469 bp, Escherichia coli
cgagcgccattcggcaggcggcggatgaagtactggcaggacagcatgacgacgaattcccgctggctatctggcagaccggctccggcacgcaaagtaacatgaacatgaacgaagtgctggctaaccgggccagtgaattactcggtggcgtgcgcgggatggaacgtaaagttcaccctaacgacgacgtgaacaaaagccaaagttccaacgatgtctttccgacggcgatgcacgttgcggcactactggcgctgcgcaagcaactcattccacaacttaaaaccctgacccagacgctgagtgaaaaatcccgcgcatttgctgatatcgtcaaaatcggtcgtacccacttgcaggacgcgacgccgttaacgctggggcaggagatttccggctgggtagcgatgctggagcataatctcaaacatatcgaatacagcctgcctcacgtagcggaactggc

SEQ ID NO: 33 - DNA, 489 bp, Escherichia coli
ttcgcctgtaaaaccgccaatggtaccgcaatccctattggcggtggcagcgccaatgtttatgtaaaccttgcgcctgccgtgaatgtggggcaaaacctggtcgtggatctttcgacgcaaatcttttgccataacgattacccggaaaccattacagactatgtcacactgcaacgaggttcggcttatggcggcgtgttatctagtttttccgggaccgtaaaatataatggcagtagctatcctttccctactaccagcgaaacgccgcgggttgtttataattcgagaacggataagccgtggccggtggcgctttatttgacgccggtgagcagtgcggggggagtggcgattaaagctggctcattaattgccgtgcttattttgcgacagaccaacaactataacagcgatgatttccagtttgtgtggaatatttacgccaataatgatgtggtggtgcccactggcggctgtgatgtt

SEQ ID NO: 34 - DNA, 489 bp, Escherichia coli
ttcgcctgtaaaaccgccaatggtactgctatccctattggcggtggcagcgccaatgtttatgtaaaccttgcgcctgccgtgaatgtggggcaaaacctggtcgtggatctttcgacgcaaatcttttgccataacgattacccggaaaccattacagactatgtcacactgcaacgaggttcggcttatggcggcgtgttatctagtttttccgggaccgtaaaatataatggcagtagctatcctttccctactaccagcgaaacgccgcgggttgtttataattcgagaacggataagccgtggccggtggcgctttatttgacgcctgtgagcagtgctggcggggtggcgattaaagctggttcattaattgccgtgcttattttgcgacagaccaacaactataacagcgatgattttcagtttgtgtggaatatttacgccaataatgatgtggtggtgcccactggcggctgtgatgtt

SEQ ID NO: 35 - DNA, 489 bp, Escherichia coli; identical to SEQ ID NO: 30

SEQ ID NO: 36 - DNA, 489 bp, Escherichia coli
ttcgcctgtaaaaccgccaatggtaccgctatccctattggcggtggcagcgccaatgtttatgtaaaccttgcgcctgccgtgaatgtggggcaaaacctggtcgtggatctttcgacgcaaatcttttgccataacgattacccggaaaccattacagactatgtcacactgcaacgaggttcggcttatggcggcgtgttatctagtttttccgggaccgtaaaatataatggcagtagctatcctttccctactaccagcgaaacgccgcgggttgtttataattcgagaacggataagccgtggccggtggcgctttatttgacgcctgtgagcagtgcggggggagtggcgattaaagcaggctcattaattgccgtgcttattttgcgacagaccaacaactataacagcgatgatttccagtttgtgtggaatatttacgccaataatgatgtggtggtgcccactggcggctgtgatgtt

SEQ ID NO: 37 - DNA, 489 bp, Escherichia coli
ttcgcctgtaaaaccgccaatggtaccgctatccctattggcggtggcagcgccaatgtttatgtaaaccttgcgcctgccgtgaatgtggggcaaaacctggtcgtggatctttcgacgcaaatcttttgccataacgattacccggaaaccattacagactatgtcacactgcaacgaggttcggcttatggcggcgtgttatctagtttttccgggatcgtaaaatataatggcagtagctatcctttccctactaccagcgaaacgccgcgggttgtttataattcgagaacggataagccgtggccggtggcgctttatttgacgcctgtgagcagtgcggggggagtggcgattaaagctggctcattaattgccgtgcttattttgcgacagaccaacaactataacagcgatgatttccagtttgtgtggaatatttacgccaataatgatgtggtggtgcccactggcggctgtgatgtt

SEQ ID NO: 38 - DNA, 489 bp, Escherichia coli; identical to SEQ ID NO: 17

SEQ ID NO: 39 - DNA, 489 bp, Escherichia coli
ttcgcctgtaaaaccgccaatggtaccgctatccctattggcggtggcagcgccaatgtttatgtaaaccttgcgcctgccgtgaatgtggggcaaaacctggtcgtggatctttcgacgcaaatcttttgccataacgattacccggaaaccattacagactatgtcacactgcaacgaggttcggcttatggcggcgtgttatctagtttttccgggaccgtaaaatataatggcagtagctatcctttccctactaccagcgaaacgccgcgggttgtttataattcgagaacggataagccgtggccggtggcgctttatttgacgcctgtgagcagtgcggggggagtggcgattaaagcaggctcattaattgccgtgcttattttgcgacagaccaacaactataacagggatgatttccagtttgtgtggaatatttacgccaataatgatgtggtggtgcccactggcggctgcgatgtt

SEQ ID NO: 40 - DNA, 489 bp, Escherichia coli
ttcgcctgtaaaaccgccaatggtaccgctatccctattggcggtggcagcgccaatgtttatgtaaaccttgcgcctgccgtgaatgtggggcaaaacctggtcgtggatctttcgacgcaaatcttttgccataacgattacccggaaaccattacagactatgtcacactgcaacgaggttcggcttatggcggcgtgttatctagtttttccgggatcgtaaaatataatggcagtagctatcctttccctactaccagcgaaacgccgcgggttgtttataattcgagaacggataagccgtggccggtggcgctttatttgacgcctgtgagcagtgcggggggagtggcgattaaagcaggctcattaattgccgtgcttattttgcgacagaccaacaactataacagcgatgatttccagtttgtgtggaatatttacgccaataatgatgtggtggtgcccactggcggctgcgatgtt

SEQ ID NO: 41 - DNA, 489 bp, Escherichia coli
ttcgcctgtaaaaccgccaatggtaccgctatccctattggcggtggcagcgccaatgtttatgtaaaccttgcgcctgccgtgaatgtggggcaaaacctggtcgtggatctttcgacgcaaatcttttgccataacgattacccggaaaccattacagactatgtcacactgcaacgaggttcggcttatggcggcgtgttatctagtttttccgggaccgtaaaatataatggcagtagctatcctttccctactaccagcgaaacgccgcgggttgtttataattcgagaacggataagccgtggccggtggcgctttatttgacgcctgtgagcagtgcggggggagtggcgattaaagcaggctcattaattgccgtgcttattttgcgacagaccaacaactataacagcgatgatttccagtttgtgtggaatatttacgccaataatgatgtggtggtgcccactggcggctgcgatttt

SEQ ID NO: 42 - DNA, 489 bp, Escherichia coli; identical to SEQ ID NO: 29

SEQ ID NO: 43 - DNA, 489 bp, Escherichia coli; identical to SEQ ID NO: 24

SEQ ID NO: 44 - DNA, 489 bp, Escherichia coli
ttcgcctgtaaaaccgccaatggtaccgcaatccctattggcggtggcagcgccaatgtttatgtaaaccttgcgcctaccgtgaatgtggggcaaaacctggtcgtagatctttcgacgcaaatcttttgccataacgattacccagaaaccattacagactatgtcacactgcaacgaggttcggcttatggcggcgtgttatctagtttttccgggaccgtaaaatataatggcagtagctatcctttccctactaccagcgaaacgccgcgggttgtttataattcgagaacggataagccgtggccggtggcgctttatttgacgccggtgagcagtgcggggggagtggcgattaaagctggctcattaattgccgtgcttattttgcgacagaccaacaactataacagcgatgatttccagtttgtgtggaatatttacgccaataatgatgtggtggtgcccactggcggctgtgatgtt

SEQ ID NO: 45 - DNA, 489 bp, Escherichia coli
ttcgcctgtaaaaccgccaatggtaccgcaatccctattggcggtggcagcgccaatgtttatgtaaaccttgcgcctgccgtgaatgtggggcaaaacctggtcgtagatctttcgacgcaaatcttttgccataacgattacccagaaaccattacagactatgtcacactgcaacgaggttcggcttatggcagcgtgttatctagtttttccgggaccgtaaaatataatggcagtagctatcctttccctactaccagcgaaacgccgcgggttgtttataattcgagaacggataagccgtggccggtggcgctttatttgacgccggtgagcagtgcggggggagtggcgattaaagctggctcattaattgccgtgcttattttgcgacagaccaacaactataacagcgatgatttccagtttgtgtggaatatttacgccaataatgatgtggtggtgcccactggcggctgtgatgtt

SEQ ID NO: 46 - DNA, 489 bp, Escherichia coli
ttcgcctgtaaaaccgccaatggtaccgcaatccctattggcggtggcagcgccaatgtttatgtaaaccttgcgcctgccgtgaatgtggggcaaaacctggtcgtagatctttcgacgcaaatcttttgccataacgattacccagaaaccattacagactatgtcacactgcaacgaggttcggcttatggcggcgtgttatctagtttttccgggaccgtaaaatataatggcagtagctatcctttccctactaccagcgaaacgccgcgggttgtttataattcgagaacggataagccgtggccggtggtgctttatttgacgccggtgagcagtgcggggggagtggcgattaaagctggctcattaattgccgtgcttattttgcgacagaccaacaactataacagcgatgatttccagtttgtgtggaatatttacgccaataatgatgtggtggtgcccactggcggctgtgatgtt

SEQ ID NO: 47 - DNA, 489 bp, Escherichia coli; identical to SEQ ID NO: 33

SEQ ID NO: 48 - DNA, 489 bp, Escherichia coli; identical to SEQ ID NO: 31

SEQ ID NO: 49 - DNA, 489 bp, Escherichia coli
ttcgcctgtaaaaccgccaatggtaccgcaatccctattggcggtggcagcgccaatgtttatgtaaaccttgcgcctgtcgtgaatgtggggcaaaacctggtcgtagatctttcgacgcaaatcttttgccataacgattacccagaaaccattacagactatgtcacactgcaacgaggttcggcttatggcggcgtgttatctagtttttccgggaccgtaaaatataatggcagtagctatcctttccctactaccagcgaaacgccgcgggttgtttataattcgagaacggataagccgtggccggtggcgctttatttgacgccggtgagcagtgcggggggagtggcgattaaagctggctcattaattgccgtgcttattttgcgacagaccaacaactataacagcgatgatttccagtttgtgtggaatatttacgccaataatgatgtggtggtgcccactggcggctgcgatgtt

SEQ ID NO: 50 - DNA, 489 bp, Escherichia coli
ttcgcctgtaaaaccgccaatggtaccgcaatccctattggcggtggcagcgccaatgtttatgtaaaccttgcgcctgtcgtgaatgtggggcaaaacctggtcgtagatctttcgacgcgaatcttttgccataacgattacccagaaaccattacagactatgtcacactgcaacgaggttcggcttatggcggcgtgttatctagtttttccgggaccgtaaaatataatggcagtagctatcctttccctactaccagcgaaacgccgcgggttgtttataattcgagaacggataagccgtggccggtggcgctttatttgacgccggtgagcagtgcggggggagtggcgattaaagctggctcattaattgccgtgcttattttgcgacagaccaacaactataacagcgatgatttccagtttgtgtggaatatttacgccaataatgatgtggtggtgcccactggcggctgcgatgtt

SEQ ID NO: 51 - DNA, 489 bp, Escherichia coli
ttcgcctgtaaaaccgccaatggtaccgcaatccctattggcggtggcagcgccaatgtttatgtaaaccttgcgcctgccgtgaatgtggggcaaaacctggtcgtagatctttcgacgcaaatcttttgccataacgattacccagaaaccattacagactatgtcacactgcaacgaggtgcggcttatggcggcgtgttatctagtttttccgggaccgtaaaatataatggcagtagctatcctttccctactaccagcgaaacgccgcgggttgtttataattcgagaacggataagccgtggccggtggcgctttatttgacgccggtgagcagtgcggggggagtggcgattaaagctggctcattaattgccgtgcttattttgcgacagaccaacaactataacagcgatgatttccagtttgtgtggaatatttacgccaataatgatgtggtggtgcccactggcggctgcgatgtt

SEQ ID NO: 52 - DNA, 489 bp, Escherichia coli
ttcgcctgtaaaaccgccaatggtaccgcaatccctattggcggtggcagcgccaatgtttatgtaaaccttgcgcctgccgtgaatgtggggcaaaacctggtcgtagatctttcgacgcaaatcttttgccataacgattacccagaaaccattacagactatgtcacactgcaacgaggtgcggcttatggcggcgtgttatctagtttttccgggatcgtaaaatataatggcagtagctatcctttccctactaccagcgaaacgccgcgggttgtttataattcgagaacggataagccgtggccggtggcgctttatttgacgccggtgagcagtgcggggggagtggcgattaaagctggctcattaattgccgtgcttattttgcgacagaccaacaactataacagcgatgatttccagtttgtgtggaatatttacgccaataatgatgtggtggtgcccactggcggctgcgatgtt

SEQ ID NO: 53 - DNA, 489 bp, Escherichia coli; identical to SEQ ID NO: 28

SEQ ID NO: 54 - DNA, 489 bp, Escherichia coli
ttcgcctgtaaaaccgccaatggtaccgcaatccctattggcggtggcagcgccaatgtttatgtaaaccttgcgcctgccgtgaatgtggggcaaaacctggtcgtggatctttcgacgcaaatcttttgccataacgattacccggaaaccattacagattatgtcacactgcaacgaggctcggcttatggcggcgtgttatctaatttttccgggaccgtaaaatataatggcagtagctatcctttccctactaccagcgaaacgccgcgggttgtttataattcgagaacggataagccgtggccggtggcgctttatttgacgcctgtgagcagtgcggggggagtggcgattaaagctggctcattaattgccgtgcttattttgcgacagaccaacaactataacagcgatgatttccagtttgtgtggaatatttacgccaataatgatgtggtggtgcccactggcggctgcgatgtt

SEQ ID NO: 55 - DNA, 489 bp, Escherichia coli; identical to SEQ ID NO: 25

SEQ ID NO: 56 - DNA, 489 bp, Escherichia coli
ttcgcctgtaaaaccgccaatggtaccgctatccctattggcggtggcagcgccaatgtttatgtaaaccttgcgcccgccgtgaatgtggggcaaaacctggtcgtggatctttcgacgcaaatcttttgccataacgattatccggaaaccattacagactatgtcacactgcaacgaggctcggcttatggcggcgtgttatctaatttttccgggaccgtaaaatatagtggcagtagctatccatttcctaccaccagcgaaacgccgcgcgttgtttataattcgagaacggataagccgtggccggtggcgctttatttgacgcctgtgagcagtgcgggcggggtggcgattaaagctggctcattaattgccgtgcttattttgcgacagaccaacaactataacagcgatgattttcagtttgtgtggaatatttacgccaataatgatgtggtggtgcctactggcggctgcgatgtt

SEQ ID NO: 57 - DNA, 489 bp, Escherichia coli
ttcgcctgtaaaaccgccaatggtaccgctatccctattggcggtggcagcgccaatgtttatgtaaaccttgcgcccgccgtgaatgtggggcaaaacctggtcgtggatctttcgacgcaaatcttttgccataacgattatccggaaaccattacagactatgtcacactgcaacgaggctcggcttatggcagcgtgttatctaatttttccgggaccgtaaaatatagtggcagtagctatccatttcctaccaccagcgaaacgccgcgcgttgtttataattcgagaacggataagccgtggccggtggcgctttatttgacgcctgtgagcagtgcgggcggggtggcgattaaagctggctcattaattgccgtgcttattttgcgacagaccaacaactataacagcgatgattttcagtttgtgtggaatatttacgccaataatgatgtggtggtgcctactggcggctgcgatgtt

SEQ ID NO: 58 - DNA, 489 bp, Escherichia coli
ttcgcctgtaaaaccgccaatggtaccgctatccctattggcggtggcagcgccaatgtttatgtaaaccttgcgcccgccgtgaatgtggggcaaaacctggtcgtggatctttcgacgcaaatcttttgccataacgattatccggaaaccattacagactatgtcacactgcaacgaggctcggcttatggcggcgtgttatctaatttttccgggaccgtaaaatatagtggcagtagctatccatttcctaccaccagcgaaacgccgcgcgttgtttataattcgagaacggataagccgtggccggtggcgctttatttgacgcctgtgagcagtgcgggcggggtggcgattaaagctggctcattaattgccgtgcttattttgcgacagaccaacaactataacagcgatgatttccagtttgtgtggaatatttacgccaataatgatgtggtggtgcctactggcggctgcgatgtt

SEQ ID NO: 59 - DNA, 489 bp, Escherichia coli
ttcgcctgtaaaaccgccaatggtaccgctatccctattggcggtggcagcgccaatgtttatgtaaaccttgcgcccgccgtgaatgtggggcaaaacctggtcgtggatctttcgacgcaaatcttttgccataacgattatccggaaaccattacagactatgtcacactgcaacgaggctcggcttatggcggcgtgttatctaatttttccgggaccgtaaaatatagtggcagtagctatccatttcctaccaccagcgaaacgccgcgcgttgtttataattcgagaacggataagccgtggccggtggcgctttatttgacgcctgtgagcagtgcgggcggggtggcgattaaagctggctcattaattgccgtgcttattttgcgacagaccaacaactataacagcgatgatttccagtttgtgtggaatatttactccaataatgatgtggtggtgcctactggcggctgcgatgtt

SEQ ID NO: 60 - DNA, 489 bp, Escherichia coli; identical to SEQ ID NO: 15

SEQ ID NO: 61 - DNA, 489 bp, Escherichia coli
ttcgcctgtaaaaccgccaatggtaccgctatccctattggcggtggcagcgccaatgtttatgtaaaccttgcgcccgtcgtgaatgtggggcaaaacctggtcgtggatctttcgacgcaaatcttttgccataacgattatccggaaaccattacagactatgtcacactgcaacgaggctcggcttatggcggcgtgttatctaatttttccgggaccgtaaaatatagtggcagtagctatccatttcctaccaccagcgaaacgccgcgcgttgtttataattcgagaacggataagccgtggccggtggcgctttatttgacgcctgtgagcagtgcgggcagggtggcgattaaagctggctcattaattgccgtgcttattttgcgacagaccaacaactataacagcgatgatttccagtttgtgtggaatatttacgccaataatgatgtggtggtgcctactggcggctgcgatgtt

SEQ ID NO: 62 - DNA, 489 bp, Escherichia coli
ttcgcctgtaaaaccgccaatggtaccgctatccctattggcggtggcagcgccaatgtttatgtaaaccttgcgcccgtcgtgaatgtggggcaaaacctggtcgtggatctttcgacgcaaatcttttgccataacgattatccggaaaccattacagactatgtcacactgcaacgaggctcggcttatggcggcgtgttatctaatttttccgggaccgtaaaatatagtggcagtagctatccatttcctaccaccagcgaaacgccgcgcgttgtttataattcgagaacggataagtcgtggccggtggcgctttatttgacgcctgtgagcagtgcgggcggggtggcgattaaagctggctcattaattgccgtgcttattttgcgacagaccaacaactataacagcgatgatttccagtttgtgtggaatatttacgccaataatgatgtggtggtgcctactggcggctgcgatgtt

SEQ ID NO: 63 - DNA, 489 bp, Escherichia coli; identical to SEQ ID NO: 13

SEQ ID NO: 64 - DNA, 489 bp, Escherichia coli
ttcgcctgtaaaaccgccaatggtaccgctatccctattggcggtggcagcgctaatgtttatgtaaaccttgcgcctgccgtgaatgtggggcaaaacctggtcgtagatctttcgacgcaaatcttttgccataacgattatccggaaaccattacagactatgtcacactgcaacgaggctcggcttatggcggcgtgttatctaatttttccgggaccgtaaaatatagtggcagtagctatccatttccgaccaccagcgaaacgccgcgggttgtttataattcgagaacggataagccgtggccggtggcgctttatttgacgcctgtgagcagtgcgggcggggtggcgattaaagctggctcattaattgccgtgcttattttgcgacagaccaacaactataacagcgatgatttccagtttgtgtggaatatttacgccaataatgatgtggtggtgcctactggcggctgcgatgtt

SEQ ID NO: 65 - DNA, 489 bp, Escherichia coli
ttcgcctgtaaaaccgccaatggtacagctatccctattggcggtggcagcgctaatgtttatgtaaaccttgcgcctgccgtgaatgtggggcaaaacctggtcgtagatctttcgacgcaaatcttttgccataacgattatccggaaaccattacagactatgtcacactgcaacgaggctcggcttatggcggcgtgttatctaatttttccgggaccgtaaaatatagtggcagtagctatccatttccgaccaccagcgaaacgccgcgggttgtttataattcgagaacggataagccgtggccggtggcgctttatttgacgcctgtgagcagtgcgggcggggtggcgattaaagctggctcattaattgccgtgcttattttgcgacagaccaacaactataacagcgatgatttccagtttgtgtggaatatttacgccaataatgatgtggtggtgcctactggcggctgcgatgtt

SEQ ID NO: 66 - DNA, 489 bp, Escherichia coli
ttcgcctgtaaaaccgccaatggtaccgctatccctattggcggtggcagcgctaatgtttatgtaaaccttgcgcctgccgtgaatgtggggcaaaacctggtcgtggatctttcgacgcaaatcttttgccataacgattatccggaaaccattacagactatgtcacactgcaacgaggctcggcttatggcggcgtgttatctaatttttccgggaccgtaaaatatagtggcagtagctatccatttccgaccaccagcgaaacgccgcgggttgtttataattcgagaacggataagccgtggccggtggcgctttatttgacgcctgtgagcagtgcgggcggggtggcgattaaagctggctcattaattgccgtgcttattttgcgacagaccaacaactataacagcgatgatttccagtttgtgtggaatatttacgccaataatgatgtggtggtgcctactggcggctgcgatgtt

SEQ ID NO: 67 - DNA, 489 bp, Escherichia coli
ttcgcctgtaaaaccgccaatggtaccgctatccctattggtggtggcagcgctaatgtttatgtaaaccttgcgcctgtcgtgaatgtggggcaaaacctggtcgtagatctttcgacgcaaatcttttgccataacgattatccggaaaccattacagactatgtcacactgcaacgaggctcggcttatggcggcgtgttatctaatttttccgggaccgtaaaatatagtggcagtagctatccatttccgaccaccagcgaaacgccgcgggttgtttataattcgagaacggataagccgtggccggtggcgctttatttgacgcctgtgagcagtgcgggcggggtggcgattaaagctggctcattaattgccgtgcttattttgcgacagaccaacaactataacagcgatgatttccagtttgtgtggaatatttacgccaataatgatgtggtggtgcctactggcggctgcgatgtt

SEQ ID NO: 68 - DNA, 489 bp, Escherichia coli
ttcgcctgtaaaaccgccaatggtacagctatccctattggcggtggcagcgctaatgtttatgtaaaccttgcgcctgccgtgaatgtggggcaaaacctggtcgtagatctttcgacgcaaatcttttgccataacgattatccggaaaccattacagactatgtcacactgcaacgaggctcggcttatggcggcgtgttatctaatttttccgggaccgtaaaatatagtggcagtagctatccatttccgaccaccagcgaaacgccgcgcgttgtttataattcgagaacggataagccgtggccggtggcgctttatttgacgcctgtgagcagtgcgggcggggtggcgattaaagctggctcattaattgccgtgcttattttgcgacagaccaacaactataacagcgatgatttccagtttgtgtggaatatttacgccaataatgatgtggtggtgcctactggcggctgcgatgtt

SEQ ID NO: 69 - DNA, 489 bp, Escherichia coli
ttcgcctgtaaaaccgccaatggtaccgctatccctattggcggtggcagcgctaatgtttatgtaaaccttgcgcctgccgtgaatgtggggcaaaacctggtcgtagatctttcgacgcaaatcttttgccataacgattatccggaaaccattacagactatgtcacactgcaacgaggctcggcttatggcggcgtgttatctaatttttccgggaccgtaaaatatagtggcagtagctatccatttccgaccaccagcgaaacgccgcgggttgtttataattcgagaacggataagccgtggccggtggcgctttatttgacgcctgtgagcagtgcgggcggggtggcgattaaagctggctcattaattgccgtgcttattttgcgacagaccaaaaactataacagcgatgatttccagtttgtgtggaatatttacgccaataatgatgtggtagtgcctactggcggctgcgatgtt

SEQ ID NO: 70 - DNA, 489 bp, Escherichia coli
ttcgcctgtaaaaccgccaatggtactgctatccctattggcggtggcagcgctaatgtttatgtaaaccttgcgcctgtcgtgaatgtggggcaaaacctggtcgtagatctttcgacgcaaatcttttgccataacgattatccggaaaccattacagactatgtcacactgcaacgaggctcggcttatggcggcgtgttatctaatttttccgggaccgtaaaatatagtggcagtagctatccatttccgaccaccagcgaaacgccgcgggttgtttataattcgagaacggataagccgtggccggtggcgctttatttgacgcctgtgagcagtgcgggcggggtggcgattaaagctggctcattaattgccgtgcttattttgcgacagaccaacaactataacagcgatgatttccagtttgtgtggaatatttacgccaataatgatgtggtggtgcctactggcggctgcgatgtt

SEQ ID NO: 71 - DNA, 489 bp, Escherichia coli
ttcgcctgtaaaaccgccaatggtaccgctatccctattggcggtggcagcgctaatgtttatgtaaaccttgcgcctgccgtgaatgtggggcaaaacctggtcgtagatctttcgacgcaaatcttttgccataacgattatccggaaaccattacagactatgtcacactgcaacgaggctcggcttatggcggcgtgttatctaatttttccgggaccgtaaaatatagtggcagtagctatccatttccgaccaccagcgaaacgccgcgcgttgtttataattcgagaacggataagccgtggccggtggcgctttatttgacgcctgtgagcagtgcgggcggggtggcgattaaagctggctcattaattgccgtgcttattttgcgacagaccaacaactataacagcgatgatttccagtttgtgtggaatatttacgccaataatgatgtggtggtgcctactggcggctgtgatgtt

SEQ ID NO: 72 - DNA, 489 bp, Escherichia coli
ttcgcctgtaaaaccgccaatggtacagctatccctattggcggtggcagcgctaatgtttatgtaaaccttgcgcctgccgtgaatgtggggcaaaacctggtcgtagatctttcgacgcaaatcttttgccataacgattatccggaaaccattacagactatgtcacactgcaacgaggctcggcttatggcggcgtgttatctaatttttccgggaccgtaaaatatagtggcagtagctatccatttccgaccaccagcgaaacgccgcgcgttgtttataattcgagaacggataagccgtggccggtggcgctttatttgacgcctgtgagcagtgcgggcggggtggcgattaaagctggctcattaattgccgtgcttattttgcgacagaccaacaactataacagcgatgatttccagtttgtgtggaatatttacgccaataatgatgtggtggtgcctactggcggctgtgatgtt

SEQ ID NO: 73 - DNA, 489 bp, Escherichia coli
ttcgcctgtaaaaccgccaatggtacagctatccctattggcggtggcagcgctaatgtttatgtaaaccttgcgcctgccgtgaatgtggggcaaaacttggtcgtagatctttcgacgcaaatcttttgccataacgattatccggaaaccattacagactatgtcacactgcaacgaggctcggcttatggcggcgtgttatctaatttttccgggaccgtaaaatatagtggcagtagctatccatttccgaccaccagcgaaacgccgcgcgttgtttataattcgagaacggataagccgtggccggtggcgctttatttgacgcctgtgagcagtgcgggcggggtggcgattaaagctggctcattaattgccgtgcttattttgcgacagaccaacaactataacagcgatgatttccagtttgtgtggaatatttacgccaataatgatgtggtggtgcctactggcggctgtgatgtt

SEQ ID NO: 74 - DNA, 489 bp, Escherichia coli; identical to SEQ ID NO: 20

SEQ ID NO: 75 - DNA, 489 bp, Escherichia coli
ttcgcctgtaaaaccgccaatggtacagctatccctattggcggtggcagcgctaatgtttatgtaaaccttgcgcccgccgtgaatgtggggcaaaacctggtcgtagatctttcgacgcaaatcttttgccataacgattatccggaaaccattacagactatgtcacactgcaacgaggctcggcttatggcggcgtgttatctaatttttccgggaccgtaaaatatagtggcagtagctatccatttcctaccaccagcgaaacgccgcgcgttgtttataattcgagaacggataagccgtggccggtggtgctttatttgacgcctgtgagcagtgcgggcggggtggcgattaaagctggctcattaattgccgtgcttattttgcgacagaccaacaactataacagcgatgatttccagtttgtgtggaatatttacgccaataatgatgtggtggtgcccactggcggctgtgatgtt

SEQ ID NO: 76 - DNA, 489 bp, Escherichia coli
ttcgcctgtaaaaccgccaatggtacagctatccctattggcggtggcagcgctaatgtttatgtaaaccttgcgcccgccgtgaatgtggggcaaaacctggtcgtagatctttcgacgcaaatcttttgccataacgattatccggaaaccattacagactatgtcacactgcaacgaggctcggcttatggctgcgtgttatctaatttttccgggaccgtaaaatatagtggcagtagctatccatttcctaccaccagcgaaacgccgcgcgttgtttataattcgagaacggataagccgtggccggtggcgctttatttgacgcctgtgagcagtgcgggcggggtggcgattaaagctggctcattaattgccgtgcttattttgcgacagaccaacaactataacagcgatgatttccagtttgtgtggaatatttacgccaataatgatgtggtggtgcccactggcggctgtgatgtt

SEQ ID NO: 77 - DNA, 489 bp, Escherichia coli
ttcgcctgtaaaaccgccaatggtacagctatccctattggcggtggcagcgctaatgtttatgtaaaccttgcgcctgccgtgaatgtggggcaaaacctggtcgtagatctttcgacgcaaatcttttgccataacgattatccggaaaccattacagactatgtcacactgcaacgaggctcggcttatggctgcgtgttatctaatttttccgggaccgtaaaatatagtggcagtagctatccatttccgaccaccagcgaaacgccgcgcgttgtttataattcgagaacggataagccgtggccggtggcgctttatttgacgcctgtgagcagtgcgggcggggtggcaattaaagctggctcattaattgccgtgcttattttgcgacagaccaacaactataacagcgatgatttccagtttgtgtggaatatttacgccaataatgatgtggtggtgcctactggcggctgtgatgtt

SEQ ID NO: 78 - DNA, 489 bp, Escherichia coli
ttcgcctgtaaaaccgccaatggcaccgctatccctattggcggtggcagcgccaatgtttatgtaaaccttgcgcccgccgtgaatgtggggcaaaacctggtcgtagatctttcgacgcaaatcttttgccataacgattacccggaaaccattacagactatgtcacactgcaacgaggctctgcttatggcggcgtgttatctaatttttccgggaccgtaaaatatagtggcagtagctatccatttcctaccaccagcgaaacgccgcgcgttgtttataattcgagaacggataagccgtggccggtggcgctttatttgacgcctgtgagcagtgcgggcggggtggcgattaaagctggctcattaattgccgtgcttattttgcgacagaccaacaactataacagcgatgatttccagtttgtgtggaatatttacgccaataatgatgtggtggtgcctactggcggctgcgatgtt

SEQ ID NO: 79 - DNA, 489 bp, Escherichia coli
ttcgcctgtaaaaccgccaatggtaccgctatccctattggcggtggcagcgccaatgtttatgtaaaccttgcgcccgccgtgaatgtggggcaaaacctggtcgtagatctttcgacgcaaatcttttgccataacgattatccggaaaccattacagactatgtcacactgcaacgaggctcggcttatggcggcgtgttatctaatttttccgggaccgtaaaatatagtggcagtagctatccatttccgaccaccagcgaaacgccgcgcgttgtttataattcgagaacggataagccgtggccggtggcgctttatttgacgcctgtgagcagtgcgggcggggtggcgattaaagctggctcattaattgccgtgcttattttgcgacagaccaacaactataacagcgatgatttccagtttgtgtggaatatttacgccaataatgatgtggtggtgcctactggcggctgcgatgtt

SEQ ID NO: 80 - DNA, 489 bp, Escherichia coli
ttcgcctgtaaaaccgccaatggcaccgctatccctattggcggtggcagcgccaatgtttatgtaaaccttgcgcccgccgtgaatgtggggcaaaacctggtcgtagatctttcgacgcaaatcttttgccataacgattacccggaaaccattacagactatgtcacactgcaacgaggttcggcttatggcggcgtgttatctaatttttccgggaccgtaaaatatagtggcagtagctatccatttccgaccaccagtgaaacgccgcgcgttgtttataattcgagaacggataagccgtggccggtggcgctttatttgacgcctgtgagcagtgcgggcggggtggcgattaaagctggctcattaattgccgtgcttattttgcgacagaccaacaactataacagcgatgatttccagtttgtgtggaatatttacgccaataatgatgtggtggtgcctactggcggctgcgatgtt

SEQ ID NO: 81 - DNA, 489 bp, Escherichia coli
ttcgcctgtaaaaccgccaatggcaccgctatccctattggcggtggcagcgccaatgtttatgtaaaccttgcgcccgccgtgaatgtggggcaaaacctggtcgtagatctttcgacgcaaatcttttgccataacgattacccggaaaccattacagactatgtcacactgcaacgaggttcggcttatggcggcgtgttatctaatttttccgggaccgtaaaatatagtggcagtagctatccatttccgaccaccagcgaaacgccgcgcgttgtttataattcgagaacggataagccgtggccggtggcgctttatttgacgcctgtgagcagtgcgggcggggtggcgattaaagctggctcattaattgccgtgctaattttgcgacagaccaacaactataacagcgatgatttccagtttgtgtggaatatttacgccaataatgatgtggtggtgcctactggcggctgcgatgtt

SEQ ID NO: 82 - DNA, 489 bp, Escherichia coli
ttcgcctgtaaaaccgccaatggcaccgctatccctattggcggtggcagcgccaatgtttatgtaaaccttgcgcccgccgtgaatgtggggcaaaacctggtcgtagatctttcgacgcaaatcttttgccataacgattacccggaaaccattacagactatgtcacactgcaacgaggctcggcttacggcggcgtgttatctaatttttccgggaccgtaaaatatagtggcagtagctatccatttccgaccaccagcgaaacgccgcgcgttgtttataattcgagaacggataagccgtggccggtggcgctttatttgacgcctgtgagcagtgcgggcggggtggcgattaaagctggttcattaattgccgtgcttattttgcgacagaccaacaactataacagcgatgattttcagtttgtgtggaatatttacgccaataatgatgtggtggtgcccactggcggctgcgatgtt

SEQ ID NO: 83 - DNA, 489 bp, Escherichia coli
ttcgcctgtaaaaccgccaatggtaccgctatccctattggcggtggcagcgccaatgtttatgtaaaccttgcgcccgccgtgaatgtggggcaaaacctggtcgtggatctttcgacgcaaatcttttgccataacgattacccagaaaccattacagactatgccacactgcaacgaggctcggcttatggtggcgtgttatctaatttttccgggaccgtaaaatatagtggcagtagctatccatttccgaccaccagtgaaacgccgcgcgttgtttataattcgagaacggataagccgtggccggtggcgctttatttgacgcctgtgagcagtgcaggcggggtggcgattaaagctggctcattaattgccgtgcttattttgcgacagactaacaactataacagcgatgatttccagtttgtgtggaatatttacgccaataatgatgtggtggtgcctactggcggctgcgatgtt

SEQ ID NO: 84 - DNA, 489 bp, Escherichia coli
ttcgcctgtaaaaccgccaatggtaccgctatccctattggcggtggcagcgctaatgtttatgtaaaccttgcgcctgtcgtgaatgtggggcaaaacctggtcgtagatctttcgacgcaaatcttttgccataacgattatccggaaaccattacagactatgtcacactgcaacgaggctcggcttacggcggcgtgttatctaatttttccgggaccgtaaaatatagtggcagtagctatccatttccgaccaccagcgaaacgccgcgggttgtttataattcgagaacggataagccgtggccggtggcgctttatttgacgcctgtgagcagtgcgggcggggtggcgattaaagctggttcattaattgccgtgcttattttgcgacagaccaacaactataacagcgatgattttcagtttgtgtggaatatttacgccaataatgatgtggtggtgcccactggcggttgtgatgtt

SEQ ID NO: 85 - DNA, 489 bp, Escherichia coli
ttcgcctgtaaaaccgccaatggtaccgctatccctattggcggtggcagcgctaatgtttatgtaaaccttgcgcctgtcgtgaatgtggggcaaaacctggtcgtagatctttcgacgcaaatcttttgccataacgattatccggaaaccattacagactatgtcacactgcaacgaggctcggcttacggcggcgtgttatctaatttttccgggaccgtaaaatatagtggcagtagctatccatttccgaccaccagcgaaacgccgcgggttgtttataattcgagaacggataagccgtggccggtggcgctttatttgacgcctgtgagcagtgcgggcggggtggctattaaagctggttcattaattgccgtgcttattttgcgacagaccaacaactataacagcgatgattttcagtttgtgtggaatatttacgccaataatgatgtggtggtgcccactggcggttgtgatgtt

SEQ ID NO: 86 - DNA, 489 bp, Escherichia coli
ttcgcctgtaaaaccgccaatggcaccgctatccctattggcggtggcagcgccaatgtttatgtaaaccttgcgcccgccgtgaatgtggggcaaaacctggtcgtggatctttcgacgcaaatcttttgccataacgattacccggaaaccattacagattatgtcacactgcaacgaggctcggcttatggcggcgtgttatctaatttttccgggaccgtaaaatatagtggcagtagctatccatttccgaccaccagtgaaacgccgcgggttgtttataattcgagaacggataagccgtggccggtggcgctttatttgacgcctgtgagcagtgcgggcggggtggcgattaaagctggctcattaattgccgtgcttattttgcgacagaccaacaactataacagcgatgatttccagtttgtgtggaatatttacgccaataatgatgtggtggtgcccactggcggctgcgatgtt

SEQ ID NO: 87 - DNA, 489 bp, Escherichia coli; identical to SEQ ID NO: 19

SEQ ID NO: 88 - DNA, 489 bp, Escherichia coli
ttcgcctgtaaaaccgccaatggcaccgctatccctattggcggtggcagcgccaatgtttatgtaaaccttgcgcccgccgtgaatgtggggcaaaacctggtcgtggatctttcgacgcaaatcttttgccataacgattacccggaaaccattacagattatgccacactgcaacgaggctcggcttatggcggcgtgttatctaatttttccgggaccgtaaaatatagtggcagtagctatccatttccgaccaccagtgaaacgccgcgggttgtttataattcgagaacggataagccgtggccggtggcgctttatttgacgcctgtgagcagtgcgggcggggtggtgattaaagctggctcattaattgccgtgcttattttgcgacagaccaacaactataacagcgatgatttccagtttgtgtggaatatttacgccaataatgatgtggtggtgcccactggcggctgcgatgtt

SEQ ID NO: 89 - DNA, 489 bp, Escherichia coli
ttcgcctgtaaaaccgccaatggcaccgctatccctattggcggtggcagcgccaatgtttatgtaaaccttgcgcccgccgtgaatgtggggcaaaacctggtcgtggatctttcgacgcaaatcttttgccataacgattacccggaaaccattacagattatgtcacactgcaacgaggctcggcttatggcggcgtgttatctaatttttccgggaccgtaaaatatagtggcagtagctatccatttccgaccaccagtgaaacgccgcgggttgtttataattcgagaacggataagccgtggccggtggcgctttatttgacgcctgtgagcagtgcgggcggggtggcgattaaagctggctcattaattgccgtgcttattttgcgacagaccaacaactataacagcgatgatttccagtttgtgtggaatatttacgccaataatgatgtggtggtgcccactggcggctgtgatatt

SEQ ID NO: 90 - DNA, 489 bp, Escherichia coli
ttcgcctgtaaaaccgccaatggtaccgcaatccctattggcggtggcagcgccaatgtttatgtaaaccttgcgcctgccgtgaatgtggggcaaaacctggtcgtggatctttcgacgcaaatcttttgccataacgattacccggaaaccattacagattatgtcacactgcaacgaggctcggcttatggcggcgtgttatctaatttttccgggaccgtaaaatatagtggcagtagctatccatttcctaccaccagtgaaacgccgcgggttgtttataattcgagaacggataagccgtggccggtggcgctttatttgacgcctgtgagcagtgcgggcggggtggcgattaaagctggctcattaattgccatgcttattttgcgacagaccaacaactataacagcgatgatttccagtttgtgtggaatatttacgccaataatgatgtggtggtgcctactggcggctgcgatgtt

SEQ ID NO: 91 - DNA, 489 bp, Escherichia coli
ttcgcctgtaaaaccgccaatggtaccgcaatccctattggcggtggcagcgccaatgtttatgtaaaccttgcgcctgccgtgaatgtggggcaaaacctggtcgtagatctttcgacgcaaatcttttgccataacgattacccggaaaccattacagactatgtcacactgcaacgaggttcggcttatggcggcgtgttatctaatttttccgggaccgtaaaatatagtggcagtagctatccatttccgaccaccagtgaaacgccgcgcgttgtttataattcgagaacggataagccgtggccggtggcgctttatttgacgcctgtgagcagtgcgggcggggtggcgattaaagctggttcattaattgccgtgcttattttgcgacagaccaacaattataacagcgatgattttcagtttgtgtggaatatttacgccaataatgatgtggtggtgcccactggcggctgcgatgtt

SEQ ID NO: 92 - DNA, 489 bp, Escherichia coli
ttcgcctgtaaaaccgccaatggtaccgctatccctattggcggtggcagcgccaatgtttatgtaaaccttgcgcccgccgtgaatgtggggcaaaacctggtcgtagatctttcgacgcaaatcttttgccataacgattatccggaaaccattacagactatgtcacactgcaacgaggctcggcttatggcggcgtgttatctaatttttccgggaccgtaaaatatagtggcagtagctatccatttccgaccaccagcgaaacgccgcgcgttgtttataattcgagaacggataagccgtggccggtggcgctttatttgacgcctgtgagcagtgcgggcggggtggcaattaaagctggctcattaattgccgtgcttattttgcgacagaccaacaactataacagcgatgatttccagtttgtgtggaatatttacgccaataatgatgtggtggtgcctactggcggctgtgatgtt

SEQ ID NO: 93 - DNA, 489 bp, Escherichia coli
ttcgcctgtaaaaccgccaatggtaccgctatccctattggcggtggcagcgccaatgtttatgtaaaccttgcgcccgccgtgaatgtggggcaaaacctggtcgtagatctttcgacgcaaatcttttgccataacgattatccggaaaccattacagactatgtcacactgcaacgaggctcggcttatggcggcgtgttatctaatttttccgggaccgtaaaatatagtggcagtagctatccatttccgaccaccagcgaaacgccgcgcgttgtttataattcgagaacggataagccgtggccggtggcgctttatttgacgcctgtgagcagtgcgggcggggtggcgattaaagctggctcattaattgccgtgcttattttgcgacagaccaacaactataacagcgatgatttccagtttgtgtggaatatttacgccaataatgatgtggtggtgcctactggcggctgtgatgtt

SEQ ID NO: 94 - DNA, 489 bp, Escherichia coli
ttcgcctgtaaaaccgccaatggcaccgctatccctattggcggtggcagcgccaatgtttatgtaaaccttgcgcccgccgtgaatgtggggcaaaacctggtcgtagatctttcgatgcaaatcttttgccataacgattacccggaaaccattacagactatgtcacactgcaacgaggctcggcttacggcggcgtgttatctaatttttccgggaccgtaaaatatagtggcagtagctatccatttccgaccaccagcgaaacgccgcgcgttgtttataattcgagaacggataagccgtggccggtggcgctttatttgacgcctgtgagcagtgcgggcggggtggcgattaaagctggttcattaattgccgtgcttattttgcgacagaccaacaactataacagcgatgattttcagtttgtgtggaatatttacgccaataatgatgtggtggtgcccactggcggctgcgatgtt

SEQ ID NO: 95 - DNA, 489 bp, Escherichia coli
ttcgcctgtaaaaccgccaatggcaccgctatccctattggcggtggcagcgccaatgtttatgtaaaccttgcgcccgccgtgaatgtggggcaaaacctggtcgtggatctttcgacgcaaatcttttgccataacgattatccggaaaccattacagactatgtcacactgcaacgaggctcggcttatggcggcgtgttatctaatttttccgggaccgtaaaatatagtggcagtagctatccatttccgaccaccagcgaaacgccgcgcgttgtttataattcgagaacggataagccgtggccggtggcgctttatttgacgcctgtgagcagtgcgggcggggtggcgattaaagctggctcattaattgccgtgctaattttgcgacagaccaacaactataacagcgatgatttccagtttgtgtggaatatttacgccaataatgatgtggtggtgcctactggcggctgtgatgtt

SEQ ID NO: 96 - DNA, 489 bp, Escherichia coli
ttcgcctgtaaaaccgccaatggtaccgctatccctattggcggtggcagcgccaatgtttatgtaaaccttgcgcccgtcgtgaatgtggggcaaaacctggtcgtggatctttcgacgcaaatcttttgccataacgattatccggaaaccattacagactatgtcacactgcaacgaggctcggcttatggcggcgtgttatctaatttttccgggaccgtaaaatatagtggcagtagctatccatttcctaccaccagcgaaacgccgcgcgttgtttataattcgagaacggataagccgtggctggtggcgctttatttgacgcctgtgagcagtgcgggcggggtggcgattaaagctggctcattaattgccgtgcttattttgcgacagaccaacaactataacagcgatgatttccagtttgtgtggaatatttacgccaataatgatgtggtggtgcctactggcggctgcgatgtt

SEQ ID NO: 97 - DNA, 489 bp, Escherichia coli
ttcgcctgtaaaaccgccaatggtaccgctatccctattggcggtggcagcgccaatgtttatgtaaaccttgcgcccgccgtgaatgtggggcaaaacctggtcgtagatctttcgacgcaaatcttttgccataacgattacccggaaaccattacagactatgtcacactgcaacgaggctcggcttatggcggcgtgttatctaatttttccgggaccgtaaaatatagtggcagtagctatccatttcctaccaccagcgaaacgccgcgggttgtttataattcgagaacggataagccgtggccggtggcgctttatttgacgcctgtgagcagtgctggcggggtggcgattaaagctggctcattaattgccgtgctaattttgcgacagaccaacaactataacagcgatgatttccagtttgtgtggaatatttacgccaataatgatgtggtggtgcctactggcggctgtgatgtt

SEQ ID NO: 98 - DNA, 489 bp, Escherichia coli
ttcgcctgtaaaaccgccaatggtaccgctatccctattggcggtggcagcgccaatgtttatgtaaaccttgcgcctgccgtgaatgtggggcaaaacctggtcgtggatctttcgacgcaaatcttttgccataacgattacccggaaaccattacagactatgtcacactgcaacgaggttcggcttatggcggcgtgttatctagtttttccgggaccgtaaaatataatggcagtagctatcctttccctactaccagcgaaacgccgcgggttgtttataattcgagaacggataagccgtggccggtggcgctttatttgacgcctgtgagcagtgcggggggagtggcgattaaagcaggctcattaattgccgtgcttattttgcgacagatcaacaactataacagcgatgatttccagtttgtgtggaatatttacgccaataatgatgtggtggtgcccactggcggctgcgatgtt

SEQ ID NO: 99 - DNA, 489 bp, Escherichia coli
ttcgcctgtaaaaccgccaatggtaccgcaatccctattggcggtggcagcgccaatgtttatgtaaaccttgcgcctgccgtgaatgtggggcaaaacctggtcgtggatctttcgacgcaaatcttttgccataacgattacccggaaaccattacagactatgtcacactgcaacgaggttcggcttatggcggcgtgttatctagtttttccgggaccgtaaaatataatggcagtagctatcctttccctactaccagcgaaacgccgcgggttgtttataattcgagaacggataagccgtggccggtgacgctttatttgacgcctgtgagcagtgcggggggagtggcgattaaagcaggctcattaattgccgtgcttattttgcgacagaccaacaactataacagcgatgatttccagtttgtgtggaatatttacgccaataatgatgtggtggtgcccactggcggctgcgatgtt

SEQ ID NO: 100 - DNA, 489 bp, Escherichia coli
ttcgcctgtaaaaccgccaatggtaccgctatccctattggcggtggcagcgctaatgtttatgtaaaccttgcgcctgccgtgaatgtggggcaaaacctggtcgtagatctttcgacgcaaatcttttgccataacgattatccggaaaccattacagactatgtcacattgcaacgaggctcggcttatggcggcgtgttatctaatttttccgggaccgtaaaatatagtggcagtagctatccatttccgaccaccagcgaaacgccgcgggttgtttataattcgagaacggataagccgtggccggtggcgctttatttgacgcctgtgagcagtgcgggcggggtggcgattaaagctggttcattaattgccgtacttattttgcgacagaccaacaactataacagcgatgatttccagtttgtgtggaatatttacgccaataatgatgtggtggtgcctactggcggctgcgatgtt

SEQ ID NO: 101 - DNA, 489 bp, Escherichia coli
ttcgcctgtaaaaccgccaatggtacagctatccctattggcggtggcagcgctaatgtttatgtaaaccttacgcctgccgtgaatgtggggcaaaacctggtcgtagatctttcgacgcaaatcttttgccataacgattatccggaaaccattacagactatgtcacactgcaacgaggctcggcttatggcggcgtgttatctaatttttccgggaccgtaaaatatagtggcagtagctatccatttccgaccaccagcgaaacgccgcgggttgtttataattcgagaacggataagccgtggccggtggcgctttatttgacgcctgtgagcagtgcgggcggggtggcgattaaagctggctcattaattgccgtgcttattttgcgacagaccaacaactataacagcgatgatttccagtttgtgtggaatatttacgccaataatgatgtggtggtgcctactggcggctgtgatgtt

SEQ ID NO: 102 - DNA, 489 bp, Escherichia coli
ttcgcctgtaaaaccgccaatggtaccgcaatccctattggcggtggcagcgccaatgtttatgtaaaccttgcgcctgccgtgaatgtggggcaaaacctggtcgtagatctttcgacgcaaatcttttgccataacgattacccagaaaccattacagactatgtcacactgcaacgaggttcggcttatggcggcgtgttatctagtttttccgggaccgtaaaatataatggcagtagctatcctttccctactaccagcgaaacgccgcgggttgtttataattcgagaacggataagccgtggccggtgacgctttatttgacgccggtgagcagtgcggggggagtggcgattaaagctggctcattaattgccgtgcttattttgcgacagaccaacaactataacagcgatgatttccagtttgtgtggaatatttacgccaataatgatgtggtggtgcccactggcggctgtgatgtt

SEQ ID NO: 103 - DNA, 489 bp, Escherichia coli
ttcgcctgtaaaaccgccaatggtaccgcaatccctattggcggtggcagcgccaatgtttatgtaaaccttgcgcctgccgtgaatgtggggcaaaacctggtcgtagatctttcgacgcaaatcttttgccataacgattacccagaaaccattacagactatgtcacactgcaacgaggttcggcttatggcgacgtgttatctagtttttccgggaccgtaaaatataatggcagtagctatcctttccctactaccagcgaaacgccgcgggttgtttataattcgagaacggataagccgtggccggtggcgctttatttgacgccggtgagcagtgcggggggagtggcgattaaagctggctcattaattgccgtgcttattttgcgacagaccaacaactataacagcgatgatttccagtttgtgtggaatatttacgccaataatgatgtggtggtgcccactggcggctgtgatgtt

SEQ ID NO: 104 - DNA, 489 bp, Escherichia coli
ttcgcctgtaaaaccgccaatggtaccgtaatccctattggcggtggcagcgccaatgtttatgtaaaccttgcgcctgccgtgaatgtggggcaaaacctggtcgtagatctttcgacgcaaatcttttgccataacgattacccagaaaccattacagactatgtcacactgcaacgaggttcggcttatggcggcgtgttatctagtttttccgggaccgtaaaatataatggcagtagctatcctttccctactaccagcgaaacgccgcgggttgtttataattcgagaacggataagccgtggccggtggcgctttatttgacgccggtgagcagtgcggggggagtggcgattaaagctggctcattaattgccgtgcttattttgcgacagaccaacaactataacagcgatgatttccagtttgtgtggaatatttacgccaataatgatgtggtggtgcccactggcggctgtgatgtt

SEQ ID NO: 105 - DNA, 489 bp, Escherichia coli
ttcgcctgtaaaaccgccaatggtaccgcaatccctattggcggtggcagcgccaatgtttatgtaaaccttgcgcctgccgtgaatgtggggcaaaacctggtcgtagatctttcgacgcaaatcttttgccataacgattacccagaaaccattacagactatgtcacactgcaacgaggttcggcttatggcggcgtgttatctagtttttccgggaccgaaaaatataatggcagtagctatcctttccctactaccagcgaaacgccgcgggttgtttataattcgagaacggataagccgtggccggtggcgctttatttgacgccggtgagcagtgcggggggagtggcgattaaagctggctcattaattgccgtgcttattttgcgacagaccaacaactataacagcgatgatttccagtttgtgtggaatatttacgccaataatgatgtggtggtgcccactggcggctgtgatgtt

SEQ ID NO: 106 - DNA, 489 bp, Escherichia coli
ttcgcctgtaaaaccgccaatggtaccgcaatccctattggcggtggcagcgccaatgtttatgtaaaccttgcgcctgccgtgaatgtggggcaaaacctggtcgtagatctttcgacgcaaatcttttgccataacgattacccagaaaccattacagactatgtcacactgcaacgaagttcggcttatggcggcgtgttatctagtttttccgggaccgtaaaatataatggcagtagctatcctttccctactaccagcgaaacgccgcgggttgtttataattcgagaacggataagccgtggccggtggtgctttatttgacgccggtgagcagtgcggggggagtggcgattaaagctggctcattaattgccgtgcttattttgcgacagaccaacaactataacagcgatgatttccagtttgtgtggaatatttacgccaataatgatgtggtggtgcccactggcggctgtgatgtt

SEQ ID NO: 107 - DNA, 489 bp, Escherichia coli
ttcgcctgtaaaaccgccaatggtactgctatccctattggcggtggcagcgccaatgtttatgtaaaccttgcgcctgccgtgaatgtggggcaaaacctggtcgtagatctttcgacgcaaatcttttgccataacgattacccagaaaccattacagactatgtcacactgcaacgaggttcggcttatggcggcgtgttatctagtttttccgggaccgtaaaatataatggcagtagctatcctttccctactaccagcgaaacgccgcgggttgtttataattcgagaacggataagccgtggccggtggcgctttatttgacgccggtgagcagtgcggggggagtggcgattaaagctggctcattaattgccgtgcttattttgcgacagaccaacaactataacagcgatgatttccagtttgtgtggaatatttacgccaataatgatgtggtggtgcccactggcggctgtgatgtt

SEQ ID NO: 108 - DNA, 489 bp, Escherichia coli
ttcgcctgtaaaaccgccaatggtaccgcaatccctattggcggtggcagcgccaatgtttatgtaaaccttgcgcctgtcgtgaatgtggggcaaaacctggtcgtggatctttcgacgcaaatcttttgccataacgattacccggaaaccattacagactatgtcacactgcaacgaggttcggcttatggcggcgtgttatctagtttttccgggaccgtaaaatataatggcagtagctatcctttccctactaccagcgaaacgccgcgggttgtttataattcgagaacggataagccgtggccggtggcgctttatttgacgccggtgagcagtgcggggggagtggcgattaaagctggctcattaattgccgtgcttattttgcgacagaccaacaactataacagcgatgatttccagtttgtgtggaatatttacgccaataatgatgtggtggtgcccactggcggctgtgatgtt

SEQ ID NO: 109 - DNA, 489 bp, Escherichia coli
ttcgcctgtaaaaccgccaatggtaccgctatccctattggcggtggcagcgccaatgtttatgtaaaccttgcgcctgccgtgaatgtggggcaaaacctggtcgtggatctttcgacgcaaatcttttgccataacgattacccggaaaccattacagactatgtcacactgcaacgaggttcggcttatggcagcgtgttatctagtttttccgggaccgtaaaatataatggcagtagctatcctttccctactaccagcgaaacgccgcgggttgtttataattcgagaacggataagccgtggccggtggtgctttatttgacgcctgtgagcagtgcggggggagtggcgattaaagctggctcattaattgccgtgcttattttgcgacagaccaacaactataacagcgatgatttccagtttgtgtggaatatttacgccaataatgatgtggtggtgcccactggcggctgtgatgtt

SEQ ID NO: 110 - DNA, 489 bp, Escherichia coli
ttcgcctgtaaaaccgccaatggtaccgctatccctattggcggtggcagcgccaatgtttatgtaaaccttgcgcctgccgtgaatgtggggcaaaacctggtcgtggatctttcgacgcaaatcttttgccataacgattacccggaaaccattacagactatgtcacactgcaacgaggttcggcttatggcggcgtgttatctagtttttccgggatcgtaaaatataatggcagtagctatcctttccctactaccagcgaaacgccgcgggttgtttataattcgagaacggataagccgtggccggtggtgctttatttgacgcctgtgagcagtgcggggggagtggtgattaaagctggctcattaattgccgtgcttattttgcgacagaccaacaactataacagcgatgatttccagtttgtgtggaatatttacgccaataatgatgtggtggtgcccactggcggctgtgatgtt

SEQ ID NO: 111 - DNA, 489 bp, Escherichia coli
ttcgcctgtaaaaccgccaatggtaccgctatccctattggcggtggcagcgccaatgtttatgtaaaccttgcgcctgccgtgaatgtggggcaaaacctggtcgtagatctttcgacgcaaatcttttgccataacgattatccggaaaccattacagactatgtcacactgcaacgaggctcggcttatggcggcgtgttatctaatttttccgggaccgtaaaatatagtggcagtagctatccatttcctaccaccagcgaaacgccgcgcgttgtttataattcgagaacggataagccgtggccggtggcgctttatttgacgcctgtgagcagtgcgggcggagtggcgattaaagctggctcattaattgccgtgcttattttgcgacagaccaacaactataacagcgatgatttccagtttgtgtggaatatttacgccaataatgatgtggtggtgcccactggcggctgtgatgtt

SEQ ID NO: 112 - DNA, 489 bp, Escherichia coli
ttcgcctgtaaaaccgccaatggtaccgctatccctattggcggtggcagcgctaatgtttatgtaaaccttgcgcctgccgtgaatgtggggcaaaacctggtcgtagatctttcgacgcaaatcttttgccataacgattatccggaaaccattacagactatgtcacactgcaacgaggctcggcttatggcggcgtgttatctaatttttccgggaccgtaaaatatagtggcagtagctatccatttccgaccaccagcgaaacgccgcgggttgtttataattcgagaacggataagccgtggccggtggcgctttatttgacgcctgtgagcagtgcgggcggggtggcgattaaagctggctcattaattgccgtgcttattttgcgacagaccaacaactataacagcgatgatttccagtttgtgtggaatatttacgccaataatgatgtggtagtgcctactggcggctgcgatgtt

SEQ ID NO: 113 - DNA, 489 bp, Escherichia coli
ttcgcctgtaaaaccgccaatggtaccgctatccctattggcggtggcagcgccaatgtttatgtaaaccttgcgcctgccgtgaatgtggggcaaaacctggtcgtggatctttcgacgcaaatcttttgccataacgattacccggaaaccattacagactatgtcacactgcaacgaggttcggcttatggcggcgtgttatctagtttttccgggaccgtaaaatataatggcagtagctatcctttccctactaccagcgaaacgccgcgggttgtttataattcgagaacggataagccgtggccggtggcgctttatttgacgcctgtgagcagtgcggggggagtggcgattaaagcaggctcattaattgccgtgcttattttgcgacagaccaacaactataacagcgatgatttccagtttgtgtggaatatttacgccaataatgatgtggtggtgcccgctggcggctgcgatgtt

SEQ ID NO: 114 - skipped

SEQ ID NO: 115 - DNA, 489 bp, Escherichia coli
ttcgcctgtaaaaccgccaatggtacagctatccctattggcggtggcagcgctaatgtttatgtaaaccttgcgcctgccgtgaatgtggggcaaaacctggtcgtagatctttcgacgcaaatcttttgccataacgattatccggaaaccattacagactatgtcacactgcaacgaggctcggcttatggccgcgtgttatctaatttttccgggaccgtaaaatatagtggcagtagctatccatttccgaccaccagcgaaacgccgcgggttgtttataattcgagaacggataagccgtggccggtggcgctttatttgacgcctgtgagcagtgcgggcggggtggcgattaaagctggctcattaattgccgtgcttattttgcgacagaccaacaactataacagcgatgatttccagtttgtgtggaatatttacgccaataatgatgtggtggtgcctactggcggctgcgatgtt

SEQ ID NO: 116 - DNA, 489 bp, Escherichia coli
ttcgcctgtaaaaccgccaatggtaccgctatccctattggcggtggcagcgccaatgtttatgtaaaccttgcgcctgccgtgaatgtggggcaaaacctggtcgtggatctttcgacgcaaatcttttgccataacgattacccggaaaccattacagactatgtcacactgcaacgaagttcggcttatggcggcgtgttatctagtttttccgggaccgtaaaatataatggcagtagctatcctttccctactaccagcgaaacgccgcgggttgtttataattcgagaacggataagccgtggccggtggcgctttatttgacgcctgtgagcagtgcggggggagtggcgattaaagcaggctcattaattgccgtgcttattttgcgacagaccaacaactataacagggatgatttccagtttgtgtggaatatttacgccaataatgatgtggtggtgcccactggcggctgcgatgtt

SEQ ID NO: 117 - DNA, 489 bp, Escherichia coli
ttcgcctgtaaaaccgccaatggtacagctatccctattggcggtggcagcgctaatgtttatgtaaaccttgcgcctgccgtgaatgtggggcaaaacctggtcgtagatctttcgacgcaaatcttttgccataacgattatccggaaaccattacagactatgtcacactgcaacgaggctcggcttatggcggcgtgttatctaatttttccgggaccgtaaaatatagtggcagtagctatccatttccgaccaccagcgaaacgccgcgcgttgtttataattcgagaacggataagccgtggccggtggcgctttatttgacgcctgtgagcagtgcgggcggggtggcaattaaagctggctcattaattgccgtgcttattttgcgacagaccaacaactataacagcgatgatttccagtttgtgtggaatatttacgccaataatgatgtggtggtgcctactggcggctgtgatgtt

SEQ ID NO: 118 - DNA, 489 bp, Escherichia coli
ttcgcctgtaaaaccgccaatggtaccgctatccctattggcggtggcagcgctaatgtttatgtaaaccttgcgcctgccgtgaatgtggggcaaaacctggtcgtagatctttcgacgcaaatcttttgccataacgattatccggaaaccattacagactatgtcacactgcaacgaggctcggcttatggcggcgtgttatctaatttttccgggaccgtaaaatatagtggcagtagctatccatttccgaccaccagcgaaacgccgcgcgttgtttataattcgagaacggataagccgtggccggtggcgctttatttgacgcctgtgagcagtgcgggcggggtggcgattaaagctggctcattaattgccgtgcttattttgcgacagaccaacaactataacagcgatgatttccagtttgtgtggaatatttacgccaataatgatgtggtggtgcctactggcggctgcgatgtt

SEQ ID NO: 119 - DNA, 489 bp, Escherichia coli
ttcgcctgtaaaaccgccaatggtaccgcaatccctattggcggtggcagcgccaatgtttatgtaaaccttgcgcctgccgtgaatgtggggcaaaacctggtcgtggatctttcgacgcaaatcttttgccataacgattacccggaaaccattacagattatgtcacactgcaacgaggctcggcttatggcggcgtgttatctagtttttccgggaccgtaaaatataatggcagtagctatcctttccctactaccagcgaaacgccgcgggttgtttataattcgagaacggataagccgtggccggtggcgctttatttgacgccggtgagcagtgcggggggagtggcgattaaagctggctcattaattgccgtgcttattttgcgacagaccaacaactataacagcgatgatttccagtttgtgtggaatatttacgccaataatgatgtggtggtgcccactggcggctgtgatgtt

SEQ ID NO: 120 - DNA, 489 bp, Escherichia coli
ttcgcctgtaaaaccgccaatggtacagctatccctattggcggtggcagcgctaatgtttatgtaaaccttgcgcccgtcgtgaatgtggggcaaaacctggtcgtagatctttcgacgcaaatcttttgccataacgattatccggaaaccattacagactatgtcacactgcaacgaggctcggcttatggcggcgtgttatctaatttttccgggaccgtaaaatatagtggcagtagctatccatttcctaccaccagcgaaacgccgcgcgttgtttataattcgagaacggataagccgtggccggtggcgctttatttgacgcctgtgagcagtgcgggcggggtggcgattaaagctggctcattaattgccgtgcttattttgcgacagaccaacaactataacagcgatgatttccagtttgtgtggaatatttacgccaataatgatgtggtggtgcccactggcggctgtgatgtt

SEQ ID NO: 121 - DNA, 489 bp, Escherichia coli
ttcgcctgtaaaaccgccaatggtaccgcaatccctattggcggtggcagcgccaatgtttatgtaaaccttgcgcctgccgtgaatgtggggcaaaacctggtcgtggatctttcgacgcaaatcttttgccataacgattacccggaaaccattacagattatgtcacactgcaacgaggctcggcttatggcggcgtgttatctagtttttccgggaccgtaaaatatagtggcagtagctatccatttcctaccaccagtgaaacgccgcgggttgtttataattcgagaacggataagccgtggccggtggcgctttatttgacgcctgtgagcagtgcgggcggggtggcgattaaagctggttcattaattgccgtgcttattttgcgacagaccaacaactataacagcgatgattttcagtttgtgtggaatatttacgccaataatgatgtggtggtgcccactggcggctgcgatgtt

SEQ ID NO: 122 - DNA, 489 bp, Escherichia coli
ttcgcctgtaaaaccgccaatggcaccgctatccctattggcggtggcagcgccaatgtttatgtaaaccttgcgcccgccgtgaatgtggggcaaaacctggtcgtagatctttcgacgcaaatcttttgccataacgattacccggaaaccattacagactatgtcacactgcaacgaggttcggcttatggcggcgtgttatctaatttttccgggaccgtaaaatatagtggcagtagctatccatttccgaccaccagcgaaacgccgcgcgttgtttataattcgagaacggataagccgtggccggtggcgctttatttgacgcctgtgagcagtgcgggcggggtggcgattaaagctggttcattaattgccgtgcttattttgcgacagaccaacaactataacagcgatgattttcagtttgtgtggaatatttacgccaataatgatgtggtggtgcccactggcggctgcgatgtt

SEQ ID NO: 123 - DNA, 489 bp, Escherichia coli
ttcgcctgtaaaaccgccaatggcaccgctatccctattggcggtggcagcgccaatgtttatgtaaacattgcgcccgccgtgaatgtggggcaaaacctggtcgtggatctttcgacgcaaatcttttgccataacgattacccggaaaccattacagattatgtcacactgcaacgaggctcggcttatggcggcgtgttatctaatttttccgggaccgtaaaatatagtggcagtagctatccatttccgaccaccagtgaaacgccgcgggttgtttataattcgagaacggataagccgtggccggtggcgctttatttgacgcctgtgagcagtgcgggcggggtggtgattaaagctggctcattaattgccgtgcttattttgcgacagaccaacaactataacagcgatgatttccagtttgtgtggaatatttacgccaataatgatgtggtggtgcccactggcggctgcgatgtt

SEQ ID NO: 124 - DNA, 489 bp, Escherichia coli
ttcgcctgtaaaactgccaatggcaccgctatccctattggcggtggcagcgccaatgtttatgtaaaccttgcgcccgccgtgaatgtggggcaaaacctggtcgtagatctttcgacgcaaatcttttgccataacgattacccggaaaccattacagactatgtcacactgcaacgaggttcggcttatggcggcgtgttatctaatttttccgggaccgtaaaatatagtggcagtagctatccatttccgaccaccagtgaaacgccgcgcgttgtttataattcgagaacggataagccgtggccggtggcgctttatttgacgcctgtgagcagtgcgggcggggtggcgattaaagctggctcattaattgccgtgcttattttgcgacagaccaacaactataacagcgatgatttccagtttgtgtggaatatttacgccaataatgatgtggtggtgcctactggcggctgcgatgtt

SEQ ID NO: 125 - DNA, 489 bp, Escherichia coli
ttcgcctgtaaaaccgccaatggtgccgctatccctattggcggtggcagcgccaatgtttatgtaaaccttgcgcccgccgtgaatgtggggcaaaacctggtcgtagatctttcgacgcaaatcttttgccataacgattacccggaaaccattacagactatgtcacactgcaacgaggttcggcttatggcggcgtgttatctaatttttccgggaccgtaaaatatagtggcagtagctatccatttccgaccaccagtgaaacaccgcgcgttgtttataattcgagaacggataagccgtggccggtggcgctttatttgacgcctgtgagcagtgcgggcagggtggcgattaaagctggctcattaattgccgtgcttattttgcgacagaccaacaactataacagcgatgatttccagtttgtgtggaatatttacgccaataatgatgtggtggtgcctactggcggctgcgatgtt

SEQ ID NO: 126 - DNA, 489 bp, Escherichia coli
ttcgcctgtaaaaccgccaatggtacagctatccctattggcggtggcagcgccaatgtttatgtaaaccttgcgcccgccgtgaatgtggggcaaaacctggtcgtggatctttcgacgcaaatcttttgccataacgattatccggaaaccattacagactatgtcacactgcaacgaggctcggcttacggcggcgtgttatctaatttttccgggaccgtaaaatatagtggcagtagctatccatttccgaccaccagcgaaacgccgcgcgttgtttataattcgagaacggataagccgtggccggtggcgctttatttgacgcctgtgagcagtgcgggcggggtggcgattaaagctggttcattaattgccgtgcttattttgcgacagaccaacaattataacagcgatgattttcagtttgtgtggaatatttacgccaataatgatgtggtggtgcccactggtggctgcgatgtt

SEQ ID NO: 127 - DNA, 489 bp, Escherichia coli
ttcgcctgtaaaaccgccaatggtactgctatccctattggcggtggcagcgccaatgtttatgtaaaccttgcgcccgccgtgaatgtggggcaaaacctggtcgtagatctttcgacgcaaatcttttgccataacgattatccggaaaccattacagactatgtcacactgcaacgaggctcggcttatggcggcgtgttatctaatttttccgggaccgtaaaatatagtggcagtagctatccatttcctaccaccagcgaaacgccgcgcgttgtttataattcgagaacggataagccgtggccggtggcgctttatttgacgcctgtgagcagtgcgggcggggtggcgattaaagctggctcattaattgccgtgctaattttgcgacagaccaacaactataacagcgatgatttccagtttgtgtggaatatttacgccaataatgatgtggtggtgcctactggcggctgtgatgtt

SEQ ID NO: 128 - DNA, 489 bp, Escherichia coli
ttcgcttgtaaaaccgccaatggcaccgctatccctattggcggtggcagcgccaatgtttatgtaaaccttgcgcccgccgtgaatgtggggcaaaacctggtcgtggatctttcgacgcaaatcttttgccataacgattatccggaaaccattacagactatgtcacactgcaacgaggctcggcttatggcggcgtgttatctaatttttccgggaccgtaaaatatagtggcagtagctatccatttccgaccaccagcgaaacgccgcgcgttgtttataattcgagaacggataagccgtggccggtggcgctttatttgacgcctgtgagcagtgcgggcggggtggcgattaaagctggctcattaattgccgtgctaattttgcgacagaccaacaactataacagcgatgatttccagtttgtgtggaatatttacgccaataatgatgtggtggtgcctactggcggctgtgatgtt

SEQ ID NO: 129 - DNA, 489 bp, Escherichia coli
ttcgcctgtaaaaccgccaatggtaccgctatccctattggcggtggcagcgccaatgtttatgtaaaccttgcgcctgtcgtgaatgtggggcaaaacctggtcgtggatctttcgacgcaaatcttttgccataacgattacccggaaaccattacagactatgtcacactgcaacgaggttcggcttatggcggcgtgttatctagtttttccgggaccgtaaaatataatggcagtagctatcctttccctactaccagcgaaacgccgcgggttgtttataattcgagaacggataagccgtggccggtggtgctttatttgacgcctgtgagcagtgcggggggagtggcgattaaagcaggctcattaattgccgtgcttattttgcgacagaccaacaactataacagcgatgatttccagtttgtgtggaatatttacgccaataatgatgtggtggtgcccactggcggctgcgatgtt

SEQ ID NO: 130 - DNA, 489 bp, Escherichia coli
ttcgcctgtaaaaccgccaatggtaccgctattcctattggcggtggcagcgctaatgtttatgtaaaccttgcgcctgccgtgaatgtggggcaaaacctggtcgtagatctttcgacgcaaatcttttgccataacgattatccggaaaccattacagactatgtcacactgcaacgaggctcggcttatggcggcgtgttatctaatttttccgggatcgtaaaatatagtggcagtagctatccatttccgactaccagcgaaacgccgcgggttgtttataattcgagaacggataagccgtggccggtggcgctttatttgacgcctgtgagcagtgcgggtggggtggcgattaaagctggctcattaattgccgtgcttattttgcgacagaccaacaactataacagcgatgatttccagtttgtgtggaatatttacgccaataatgatgtggtggtgcctactggcggctgcgatgtt

SEQ ID NO: 131 - DNA, 489 bp, Escherichia coli
ttcgcctgtaaaaccgccaatggtaccgctatccctattggcggtggcagcgccaatgtttatgtaaaccttgcgcctgccgtgaatgtggggcaaaacctggtcgtggatctttcgacgcaaatcttttgccataacgattacccggaaaccattacagactatgtcacactgcaacgaggttcggcttatggcggcgtgttatctagtttttccgggaccgaaaaatataatggcagtagctatcctttccctactaccagcgaaacgccgcgggttgtttataattcgagaacggataagccgtggccggtggcgctttatttgacgcctgtgagcagtgcggggggagtggcgattaaagctggctcattaattgccgtgcttattttgcgacagaccaacaactataacagcgatgatttccagtttgtgtggaatatttacgccaataatgatgtggtggtgcccactggcggctgtgatgtt

SEQ ID NO: 132 - DNA, 489 bp, Escherichia coli
ttcgcctgtaaaaccgccaatggtaccgctatccctattggcggtggcagcgccaatgtttatgtaaaccttgcgcctgccgtgaatgtggggcaaaacctggtcgtggatctttcgaggcaaatcttttgccataacgattacccggaaaccattacagactatgtcacactgcaacgaggttcggcttatggcggcgtgttatctagtttttccgggaccgtaaaatataatggcagtagctatcctttccctactaccagcgaaacgccgcgggttgtttataattcgagaacggataagccgtggccggtggcgctttatttgacgcctgtgagcagtgcggggggagtggcgattaaagctggctcattaattgccgtgcttattttgcgacagaccaacaactataacagcgatgatttccagtttgtgtggaatatttacgccaataatgatgtggtggtgcccactggcggctgtgatgct

SEQ ID NO: 133 - DNA, 489 bp, Escherichia coli
ttcgcctgtaaaaccgccaatggtaccgcaatccctattggcggtggcagcgccaatgtttatgtaaaccttgcgcctgccgtgaatgtggggcaaaacctggtcgtagatctttcgacgcaaatcttttgccataacgattacccagaaaccattacagactatgtcacactgcaacgaggttcggcttatggcggcgtgttatctagtttttccgggaccgtaaaatataatggcagtagctatcctttccctactaccagcgaaacgccgcgggttgtttataattcgagaacggataagccgtggccggtggcgctttatttgacgctggtgagcagtgcggggggagtggcgattaaagctggctcattaattgccgtgcttattttgcgacagaccaacaactataacagcgatgatttccagtttgtgtggaatatttacgccaataatgatgtggtggtgcccactggcggctgtgatgtt

SEQ ID NO: 134 - DNA, 489 bp, Escherichia coli
ttcgcctgtaaaaccgccaatggtaccgcaatccctattggcggtggcagcgccaatgtttatgtaaaccttgcgcctgtcgtgaatgtggggcaaaacctggtcgtagatctttcgacgcaaatcttttgccataacgattacccagaaaccattacagactatgtcacactgcaacgaggttcggcttatggcggcgtgttatctagtttttccgggaccgtaaaatataatggcagtagctatcctttccctactaccagcgaaacgccgcgggttgtttataattcgagaacggataagccgtggccggtggcgctttatttgacgccggtgagcagtgcggggggagtggcgattaaagctggctcattaattgccgtgcttattttgcgacagaccaacaactataacagcgatgatttccagtttgtgtggaatatttacgccaataatgatgtggtggtgcccactggcggctgtgatgtt

SEQ ID NO: 135 - DNA, 489 bp, Escherichia coli
ttcgcctgtaaaaccgccaatggtaccgcaatccctattggcggtggcagcgccaatgtttatgtaaaccttgcgcctgccgtgaatgtggggcaaaacctggtcgtagctctttcgacgcaaatcttttgccataacgattacccagaaaccattacagactatgtcacactgcaacgaggttcggcttatggcggcgtgttatctagtttttccgggaccgtaaaatataatggcagtagctatcctttccctactaccagcgaaacgccgcgggttgtttataattcgagaacggataagccgtggccggtggcgctttatttgacgccggtgagcagtgcggggggagtggcgattaaagctggctcattaattgccgtgcttattttgcgacagaccaacaactataacagcgatgatttccagtttgtgtggaatatttacgccaataatgatgtggtggtgcccactggcggctgtgatgtt

SEQ ID NO: 136 - DNA, 489 bp, Escherichia coli
ttcgcctgtaaaaccgccaatggtaccgcaatccctattggcggtggcagcgccaatgtttatgtaaaccttgcgcctgtcgtgaatgtggggcaaaacctggtcgtagatctttcgacgcaaatcttttgccataacgattacccagaaaccattacagactatgtcacactgcaacgaggttcggcttatggcggcgtgttatctagtttttccgggaccgtaaaatataatggcagtagctatcctttccctactaccagcgaaacgccgcgggttgtttataattcgagaacggataagccgtggccggtggcgctttatttgacgccggtgagcagtgcggggggagtggcgattaaagctggctcattaattaccgtgcttattttgcgacagaccaacaactataacagcgatgatttccagtttgtgtggaatatttacgccaataatgatgtggtggtgcccactggcggctgtgatgtt

SEQ ID NO: 137 - DNA, 489 bp, Escherichia coli
ttcgcctgtaaaaccgccaatggtaccgctatccctattggcggtggcagcgccaatgtttatgtaaaccttgcgcctgccgtgaatgtggggcaaaacctggtcgtggatctttcgacgcaaatcttttgccataacgattacccggaaaccattacagactatgtcacactgcaacgaggttcggcttatggcggcgtgttatctagtttttccgggatcgtaaaatataatggcagtagctatcctttccctactaccagcgaaacgccgcgggttgtttataattcgagaacggataagccgtggccggtggcgctttatttgacgcctgtgagcagtgcggggggagtggcgattaaagcaggctcattaattgccgtgcttattttgcgacagaccaacaactataacagcgatgatttccagtttgtgtggaatatttacgccaataatgatgtggtggtgcccactggcggctgcgatgct

SEQ ID NO: 138 - DNA, 489 bp, Escherichia coli
ttcgcctgtaaaaccgccaatggtaccgcaatccctattggcggtggcagcgccaatgtttatgtaaaccttgcgcctgccgtgaatgtggggcaaaacctggtcgtagatctttcgacgcaaatcttttgccataacgattacccagaaaccattacagactatgtcacactgcaacgaggttcggcttatggctgcgtgttatctagtttttccgggaccgtaaaatataatggcagtagctatcctttccctactaccagcgaaacgccgcgggttgtttataattcgagaacggataagccgtggccggtggcgctttatttgacgccggtgagcagtgcggggggagtggcgattaaagctggctcattaattgccgtgcttattttgcgacagaccaacaactataacagcgatgatttccagtttgtgtggaatatttacgccaataatgatgtggtggtgcccactggcggctgcgatgtt

SEQ ID NO: 139 - DNA, 489 bp, Escherichia coli
ttcgcctgtaaaaccgccaatggtaccgctatccctattggcggtggcagcgctaatgtttatgtaaaccttgcgcctgccgtgaatgtggggcaaaacctggtcgtagatctttcgacgcaaatcttttgccataacgattatccggaaaccattacagactatgtcacactgcaacgaggctcggcttatggcggcgtgttagctaatttttccgggaccgtaaaatatagtggcagtagctatccatttccgaccaccagcgaaacgccgcgggttgtttataattcgagaacggataagccgtggccggtggcgctttatttgacgcctgtgagcagtgcgggcggggtggcgattaaagctggctcattaattgccgtgcttattttgcgacagaccaacaactataacagcgatgattttcagtttgtgtggaatatttacgccaataatgatgtggtggtgcctactggcggctgtgatgtt

SEQ ID NO: 140 - DNA, 489 bp, Escherichia coli
ttcgcctgtaaaaccgccaatggtacagctatccctattggcggtggcagcgctaatgtttatgtaaaccttacgcctgccgtgaatgtggggcaaaacctggtcgtagatctttcgacgcaaatcttttgccataacgattatccggaaaccattacagactatgtcacactgcaacgaggctcggcttatggcggcgtgttatctaatttttccgggaccgtaaaatatagtggcagtagctatccatttccgaccaccagcgaaacgccgcgggttgtttataattcgagaacggataagccgtggccggtggcgctttatttgacgcctgtgagcagtgcgggcgggggggcgattaaagctggctcattaattgccgtgcttattttgcgacagaccaacaactataacagcgatgatttccagtttgtgtggaatatttacgccaataatgatgtggtggtgcctactggcggctgtgatgtt

SEQ ID NO: 141 - DNA, 489 bp, Escherichia coli
ttcgcctgtaaaaccgccaatggcaccgctatccctattggcggtggcagcgccaatgtttatgtaaaccttgcgcccgccgtgaatgtggggcaaaacctggtcgtagatctttcgacgcaaatcttttgccataacgattacccggaaaccattacagactatgtcacactgcaacgaggttcggcttatggcggcgtgttatctaatttttccgggaccgtaaaatatagtggcagtagctatccatttcctaccaccagcgaaacgccgcgcgttgtttataattcgagaacggataagccgtggccggtggcgctttatttgacgcctgtgagcagtgcgggcggggtggcgattaaagctggctcattaattgccgtgctaattttgcgacagaccaacaactataacagcgatgatttccagtttgtgtggaatatttacgccaataatgatgtggtggtgcccactggcggctgcgatgtt

SEQ ID NO: 142 - DNA, 489 bp, Escherichia coli
ttcgcctgtaaaaccgccaatggcaccgctatccctattggcggtggcagcgccaatgtttatgtaaaccttgcgcccgccgtgaatgtggggcaaaacctggtcgtggatctttcgacgcaaatcttttgccataacgattacccggaaaccattacagattatgtcacactgcaacgaggctcggcttatggcggcgtgttatctaatttttccgggaccgtaaaatatagtggcagtagctatccatttccgaccaccagtgaaacgccgcgggttgtttataattcgagaacggataagccgtggccggtggcgctttatttgacgcctgtgagcagtgcgggcggggtggtgattaaagctggctcattaattgccgtgcttattttgcgacagaccaacaactataacagcgatgatttccagtttgtgtggaatatttacgccaataatgatgtggtggtgcccactggcggctgtgatgtt

SEQ ID NO: 143 - DNA, 489 bp, Escherichia coli
ttcgcctgtaaaaccgccaatggtaccgcaatccctattggcggtggcagcgccaatgtttatgtaaaccttgcgcctgccgtgaatgtggggcaaaacctggtcgtagatccttcgacgcaaatcttttgccataacgattacccagaaaccattacagactatgtcacactgcaacgaggttcggcttatggcggcgtgttatctagtttttccgggaccgtaaaatataatggcagtagctatcctttccctactaccagcgaaacgccgcgggttgtttataattcgagaacggataagccgtggccggtggcgctttatttgacgccggtgagcagtgcggggggagtggcgattaaagctggctcattaattgccgtgcttattttgcgacagaccaacaactataacagcgatgatttccagtttgtgtggaatatttacgccaataatgatgtggtggtgcccactggcggctgtgatgtt

SEQ ID NO: 144 - DNA, 489 bp, Escherichia coli
ttcgcctgtaaaaccgccaatggtaccgcaatccctattggcggtggcagcgccaatgtttatgtaaaccttgcgcctgtcgtgaatgtggggcaaaacctggtcgtagatctttcgacgcaaatcttttgccataacgattacccagaaaccattacagactatgtcacactgcaacgaggttcggcttatggcagcgtgttatctagtttttccgggaccgtaaaatataatggcagtagctatcctttccctactaccagcgaaacgccgcgggttgtttataattcgagaacggataagccgtggccggtggcgctttatttgacgccggtgagcagtgcggggggagtggcgattaaagctggctcattaattgccgtgcttattttgcgacagaccaacaactataacagcgatgatttccagtttgtgtggaatatttacgccaataatgatgtggtggtgcccactggcggctgtgatgtt

SEQ ID NO: 145 - DNA, 489 bp, Escherichia coli
ttcgcctgtaaaaccgccaatggtaccgcaatccctattggcggtggcagcgccaatgtttatgtaaaccttgcgcctgccgtgaatgtggggcaaaacctggtcgtggatatttcgacgcaaatcttttgccataacgattacccggaaaccattacagactatgtcacactgcaacgaggttcggcttatggcggcgtgttatctagtttttccgggaccgtaaaatataatggcagtagctatcctttccctactaccagcgaaacgccgcgggttgtttataattcgagaacggataagccgtggccggtggcgctttatttgacgccggtgagcagtgcggggggagtggcgattaaagctggctcattaattgccgtgcttattttgcgacagaccaacaactataacagcgatgatttccagtttgtgtggaatatttacgccaataatgatgtggtggtgcccactggcggctgtgatgtt

SEQ ID NO: 146 - DNA, 489 bp, Escherichia coli
ttcgcctgtaaaaccgccaatggtactgctatccctattggcggtggcagcgccaatgtttatgtaaaccttgcgcctgccgtgaatgtggggcaaaacctggtcgtggatctttcgacgcaaatcttttgccataacgattacccggaaaccattacagactatgtcacactgcaacgaggttcggcttatggcggcgtgttatctagtttttccgggaccgtaaaatataatggcagtagctatcctttccctactaccagcgaaacgccgcgggttgtttataattcgagaacggataagccgtggccggtggcgctttatttgacgccggtgagcagtgcggggggagtggcgattaaagctggctcattaattgccgtgcttattttgcgacagaccaacaactataacagcgatgatttccagtttgtgtggaatatttacgccaataatgatgtggtggtgcccactggcggctgcgatgtt

SEQ ID NO: 147 - DNA, 489 bp, Escherichia coli
ttcgcctgtaaaaccgccaatggtaccgctatccctattggcggtggcagcgccaatgtttatgtaaaccttgcgcctgccgtgaatgtggggcaaaacctggtcgtggatctttcgacgcaaatcttttgccataacgattacccggaaaccattacagactatgtcacactgcaacgagcttcggcttatggcggcgtgttatctagtttttccgggaccgtaaaatataatggcagtagctatcctttccctactaccagcgaaacgccgcgggttgtttataattcgagaacggataagccgtggccggtggcgctttatttgacgcctgtgagcagtgcggggggagtggcgattaaagcaggctcattaattgccgtgcttattttgcgacagaccaacaactataacagcgatgatttccagtttgtgtggaatatttacgccaataatgatgtggtggtgcccactggcggctgcgatgtt

SEQ ID NO: 148 - DNA, 489 bp, Escherichia coli
ttcgcctgtaaaaccgccaatggtaccgctatccctattggcggtggcagcgccaatgtttatgtaaaccttgcgcctgccgtgaatgtggggcaaaacctggtcgtggatctttcgacgcaaatcttttgccataacgattacccggaaaccattacagactatgtcacactgcaacgaggtgcggcttatggcggcgtgttatctagtttttccgggaccgtaaaatataatggcagtagctatcctttccctactaccagcgaaacgccgcgggttgtttataattcgagaacggataagccgtggccggtggcgctttatttgacgcctgtgagcagtgcggggggagtggcgattaaagcaggctcattaattgccgtgcttattttgcgacagaccaacaactataacagcgatgatttccagtttgtgtggaatatttacgccaataatgatgtggtggtgcccactggcggctgcgatgtt

SEQ ID NO: 149 - DNA, 489 bp, Escherichia coli
ttcgcctgtaaaaccgccaatggtaccgcaatccctattggcggtggcagcgccaatgtttatgtaaaccttgcgcctgccgtgaatgtggggcaaaacctggtcgtagatctttcgacgcaaatcttttgccataacgattacccagaaaccattacagactatgccacactgcaacgaggttcggcttatggcggcgtgttatctagtttttccgggaccgtaaaatataatggcagtagctatcctttccctactaccagcgaaacgccgcgggttgtttataattcgagaacggataagccgtggccggtggcgctttatttgacgccggtgagcagtgcggggggagtggcgattaaagctggctcattaattgccgtgcttattttgcgacagaccaacaactataacagcgatgatttccagtttgtgtggaatatttacgccaataatgatgtggtggtgcccactggcggctgtgatgct

SEQ ID NO: 150 - DNA, 489 bp, Escherichia coli
ttcgcctgtaaaaccgccaatggtaccgcaatccctattggcggtggcagcgccaatgtttatgtaaaccttgcgcctgccgtgaatgtggggcaaaacctggtcgtagatctttcgacgcaaatcttttgccataacgattacccagaaaccattacagactatgtcacactgcaacgaggtgcggcttatggcggcgtgttatctagtttttccgggaccgtaaaatataatggcagtagctatcctttccctactaccagcgaaacgccgcgggttgtttataattcgagaacggataagccgtggccggtggcgctttatttgacgccggtgagcagtgcggggggagtggcgattaaagctggctcattaattgccgtgcttattttgcgacagaccaacaactataacagcgatgatttccagtttgtgtggaatatttacgccaataatgatgtggtggtgcccactggcggctgtgatgtt

SEQ ID NO: 151 - DNA, 489 bp, Escherichia coli
ttcgcctgtaaaaccgccaatggtactgctatccctattggcggtggcagcgccaatgtttatgtaaaccttgcgcctgccgtgaatgtggggcaaaacctggtcgtggatctttcgacgcaaatcttttgccataacgattacccggaaaccattacagactatgtcacactgcaacgaggttcggcttatggcggcgtgttatctagtttttccgggaccgtaaaatataatggcagtagctatcctttccctactaccagcgaaacgccgcgggttgtttataattcgagaacggataagccgtggccggtggtgctttatttgacgcctgtgagcagtgctggcggggtggcgattaaagctggttcattaattgccgtgcttattttgcgacagaccaacaactataacagcgatgattttcagtttgtgtggaatatttacgccaataatgatgtggtggtgcccactggcggctgtgatgtt

SEQ ID NO: 152 - DNA, 489 bp, Escherichia coli
ttcgcctgtaaaaccgccaatggtaccgctatccctattggcggtggcagcgctaatgtttatgtaaaccttgcgcctgccgtgaatgtggggcaaaacctggtcgtagatctttcgacgcaaatcttttgccataacgattatccggaaaccattacagactatgtcacattgcaacgaggctcggcttatggcggcgtgttatctaatttttccgggaccgtaaaatatagtggcagtagctatccatttccgaccaccagcgaaacgccgcgcgttgtttataattcgagaacggataagccgtggccggtggcgctttatttgacgcctgtgagcagtgcgggcggggtggcgattaaagctggctcattaattgccgtgcttattttgcgacagaccaacaactataacagcgatgatttccagtttgtgtggaatatttacgccaataatgatgtggtggtgcctactggcggctgtgatgtt

SEQ ID NO: 153 - DNA, 489 bp, Escherichia coli
ttcgcctgtaaaaccgccaatggtaccgctatccctattggcggtggcagcgccaatgtttatgtaaaccttgcgcccgccgtgaatgtggggcaaaacctggtcgtggatctttcgacgcaaatcttttgccataacgattatccggaaaccattacagactatgtcacactgcaacgaggctcggcttatggcagcgtgttatctaatttttccgggaccgtaaaatatagtggcagtagctatccatttcctaccaccagcgaaacgccgcgcgttgtttataattcgagaacggataagccgtggccggtggcgctttatttgacgcctgtgagcagtgcgggcggggtggcgattaaagctggctcattaattgccgtgcttattttgcgacagaccaacaactataacagcgatgatttccagtttgtgtggaatatttacgccaataatgatgtggtggtgcctactggcggctgcgatgtt

SEQ ID NO: 154 - DNA, 489 bp, Escherichia coli
ttcgcctgtaaaaccgccaatggcaccgctatccctattggcggtggcagcgccaatgtttatgtaaaccttgcgcccgccgtgaatgtggggcaaaacctggtcgtggatctttcgacgcaaatcttttgccataacgattacccggaaaccattacagactatgtcacactgcaacgaggttcggcttatggcggcgtgttatctaatttttccgggaccgtaaaatatagtggcagtagctatccatttcctaccaccagcgaaacgccgcgggttgtttataattcgagaacggataagccgtggccggtggcgctttatttgacgcctgtgagcagtgcgggcggggtggcgattaaagctggctcattaattgccgtgctaattttgcgacagaccaacaactataacagcgatgatttccagtttgtgtggaatatttacgccaataatgatgtggtggtgcctactggcggctgtgatgtt

SEQ ID NO: 155 - DNA, 489 bp, Escherichia coli
ttcgcctgtaaaaccgccaatggtaccgctatccctattggtggtggcagcgctaatgtttatgtaaaccttgcgcctgccgtgaatgtggggcaaaacctggtcgtagatctttcgacgcaaatcttttgccataacgattatccggaaaccattacagactatgtcacactgcaacgaggctcggcttatggcggcgtgttatctaatttttccgggaccgtaaaatatagtggcagtagctatccatttccgaccaccagcgaaacgccgcgggttgtttataattcgagaacggataagccgtggccggtggcgctttatttgacgcctgtgagcagtgcgggcggggtggcgattaaagctggctcattaattgccgtgcttattttgcgacagaccaacaactataacagcgatgatttccagtttgtgtggaatatttacgccaataatgatgtggtggtgcctactggcggctgcgatgtt

SEQ ID NO: 156 - DNA, 489 bp, Escherichia coli
ttcgcctgtaaaaccgccaatggtaccgctatccctattggcggtggcagcgctaatgtttatgtaaaccttgcgcctgccgtgaatgtggggcaaaacctgatcgtagatctttcgacgcaaatcttttgccataacgattatccggaaaccattacagactatgtcacactgcaacgaggctcggcttatggcggcgtgttatctaatttttccgggaccgtaaaatatagtggcagtagctatccatttccgaccaccagcgaaacgccgcgggttgtttataattcgagaacggataagccgtggccggtggcgctttatttgacgcctgtgagcagtgcgggcggggtggcgattaaagctggctcattaattgccgtgcttattttgcgacagaccaacaactataacagcgatgatttccagtttgtgtggaatatttacgccaataatgatgtggtggtgcctactggcggctgcgatgtt

SEQ ID NO: 157 - DNA, 489 bp, Escherichia coli
ttcgcctgtaaaaccgccaatggtaccgcaatccctattggcggtggcagcgccaatgtttatgtaaaccttgcgcctgccgtgaatgtggggcaaaacctggtcgtggatctttcgacgcaaatcttttgccataacgattacccggaaaccattacagattatgtcacactgcaacgaggctcggcttatggcggcgtgttatctaatttttccgggaccgtaaaatataatggcagtagctatcctttccctactaccagcgaaacgccgcgggttgtttataattcgagaacggataagccgtggccggtgacgctttatttgacgcctgtgagcagtgcggggggagtggtgattaaagctggctcattaattgccgtgctaattttgcgacagaccaacaactataacagcgatgatttccagtttgtgtggaatatttacgccaataatgatgtggtggtgcctactggcggctgtgatgtt

SEQ ID NO: 158 - DNA, 489 bp, Escherichia coli
ttcgcctgtaaaacctccaatggtaccgctatccctattggcggtggcagcgccaatgtttatgtaaaccttgcgcccgccgtgaatgtggggcaaaacctggtcgtagatctttcgacgcaaatcttttgccataacgattacccggaaaccattacagactatgtcacactgcaacgaggctcggcttatggcggcgtgttatctaatttttccgggaccgtaaaatatagtggcagtagctatccatttcctaccaccagcgaaacgccgcgggttgtttataattcgagaacggataagccgtggccggtggcgctttatttgacgcctgtgagcagtgctggcggggtggcgattaaagctggctcattaattgccgtgctaattttgcgacagaccaacaactataacagcgatgatttccagtttgtgtggaatatttacgccaataatgatgtggtggtgcctactggcggctgtgatgtt

SEQ ID NO: 159 - DNA, 489 bp, Escherichia coli
ttcgcctgtaaaaccgccaatggtaccgcaatccctattggcggtggcagcgccaatgtttatgtaaaccttgcgcctgtcgtgaatgtggggcaaaacctggtcgtagatctttcgacgcaaatcttttgccataacgattacccagaaaccattacagactatgtcacactgcaacgaggttcggcttatggcggcgtgttatctagtttttccgggaccgtaaaatataatggcagtagctatcctttccctactaccagcgaaacgccgcgggttgtttataattcgagaacggataagccgtggccggtggcgctttatttgaggccggtgagcagtgcggggggagtggcgattaaagctggctcattaattgccgtgcttattttgcgacagaccaacaactataacagcgatgatttccagtttgtgtggaatatttacgccaataatgatgtggtggtgcccactggcggctgtgatgtt

SEQ ID NO: 160 - DNA, 489 bp, Escherichia coli
ttcgcctgtaaaaccgccaatggtaccgctatccctattggcggtggcagcgccaatgtttatgtaaaccttgcgcctgtcgtgaatgtggggcaaaacctggtcgtggatctttcgacgcaaatcttttgccataacgattacccggaaaccattacagactatgtcacactgcaacgaggttcggcttatggcggcgtgttatctagtttttccgggaccgtaaaatataatggcagtagctatcctttccctactaccagcgaaacgccgcgggttgtttataattcgagaacggataagccgtggccggtggcgctttatttgacggctgtgagcagtgcggggggagtggcgattaaagctggctcattaattgccgtgcttattttgcgacagaccaacaactataacagcgatgatttccagtttgtgtggaatatttacgccaataatgatgtggtggtgcccactggcggctgtgatgtt

SEQ ID NO: 161 - DNA, 489 bp, Escherichia coli
ttcgcctgtaaaaccgccaatggtaccgctatccctattggcggtggcagcgccaatgtttatgtaaaccttgcgcctgccgtgaatgtggggcaaaacctggtcgtggatctttcgacgcaaatcttttgccataacgattacccggaaaccattacagactatgtcacactgcaacgaggttcggcttatggcggcgtgttatctagtttttccgggaccgtaaaatataatggcagtagctatcctttccctactaccagcgaaacgccgcgggttgtttataattcgagaacggataagccgtggccggtggcgctttatttgacgcctgtgagcagtgcggggggagtggtgattaaagcaggctcattaattgccgtgcttattttgcgacagaccaacaactataacagcgatgatttccagtttgtgtggaatatttacgccaataatgatgtggtggtgcccactggcggctgcgatgtt

SEQ ID NO: 162 - DNA, 489 bp, Escherichia coli
ttcgcctgtaaaaccgccaatggtaccgcaatccctattggcggtggcagcgccaatgtttatgtaaaccttgcgcctgccgtgaatgtggggcaaaacctggtcgtggatctttcgacgcaaatcttttgccataacgattacccggaaaccattacagattatgtcacactgcaacgaggctcggcttatggttgcgtgttatctaatttttccgggaccgtaaaatataatggcagtagctatcctttccctactaccagcgaaacgccgcgggttgtttataattcgagaacggataagccgtggccggtggcgctttatttgacgcctgtgagcagtgcggggggagtggcgattaaagctggctcattaattgccgtgcttattttgcgacagaccaacaactataacagcgatgatttccagtttgtgtggaatatttacgccaataatgatgtggtggtgcccactggcggctgcgatgtt

SEQ ID NO: 163 - DNA, 489 bp, Escherichia coli
ttcgcctgtaaaaccgccaatggtaccgcaatccctattggcggtggcagcgccaatgtttatgtaaaccttgcgcctgccgtgaatgtggggcaaaacctggtcgtggatctttcgacgcaaatcttttgccataacgattacccggaaaccattacagattatgtcacactgcaacgaggctcggcttatggcggcgtgttatctaatttttccgggaccgtaaaatataatggcagtagctatcctttccctactaccagcgaaacgccgcgggttgtttataattcgagaacggataagccgtggccggtggtgctttatttgacgcctgtgagcagtgcggggggagtggcgattaaagctggctcattaattgccgtgcttattttgcgacagaccaacaactataacagcgatgatttccagtttgtgtggaatatttacgccaataatgatgtggtggtgcccactggcggctgcgatgtt

SEQ ID NO: 164 - DNA, 489 bp, Escherichia coli
ttcgcctgtaaaaccgccaatggtaccgctatccctattggcggtggcagcgctaatgtttatgtaaaccttgcgcctgccgtgaatgtggggcaaaacctggtcgtagatctttcgacgcaaatcttttgccataacgattatccggaaaccattacagactatgtcacactgcaacgaggctcggcttatggcggcgtgttatctaatttttccgggaccgtaaaatatagtggcagtagctatccatttccgaccaccagcgaaacgccgcgggttgtttataattcgagaacggataagccgtggccggtggcgctttatttgacgcctgtgagcagtgcgggcggggtggcgattaaagctggttcattaattgccgtgcttattttgcgacagaccaacaattataacagcgatgatttccagtttgtgtggaatatttacgccaataatgatgtggtggtgcctactggcggctgcgatgtt

SEQ ID NO: 165 - DNA, 489 bp, Escherichia coli
ttcgcctgtaaaaccgccaatggtaccgctatccctattggcggtggcagcgccaatgtttatgtaaaccttgcgcccgtcgtgaatgtggggcaaaacctggtcgtggatctttcgactcaaatcttttgccataacgattatccggaaaccattacagactatgtcacactgcaacgaggctcggcttatggcggcgtgttatctaatttttccgggaccgtaaaatatagtggcagtagctatccatttcctaccaccagcgaaacgccgcgcgttgtttataattcgagaacggataagccgtggccggtggcgctttatttgacgcctgtgagcagtgcgggcggggtggcgattaaagctggctcattaattgccgtgcttattttgcgacagaccaacaactataacagcgatgatttccagtttgtgtggaatatttacgccaataatgatgtggtggtgcctactggcggctgcgatgtt

SEQ ID NO: 166 - DNA, 489 bp, Escherichia coli
ttcgcctgtaaaaccgccaatggtaccgctatccctattggcggtggcagcgccaatgtttatgtaaaccttgcgcctgccgtgaatgtggggcaaaacctggtcgtggatctttcgacgcaaatcttttgccataacgattacccggaaaccattacagactatgtcacactgcaacgaggttcggcttatggcggcgtgttatctagtttttccgggaccgtaaaatataatggcagtagctatcctttccctactaccagcgaaacgccgcgggttgtttataattcgagaacggataagccgtggccggtggcgctttatttgacgcctgtgagcagtgcggggggagtggcgattaaagctggctcattaattgccgtgcttattttgcgacagaccaacaactataacagcgatgatttccagtttgtgtggaatatttacgccaataatgatgtggtggtgcccactggcggctgcgatgtt

SEQ ID NO: 167 - DNA, 489 bp, Escherichia coli
ttcgcctgtaaaaccgccaatggtaccgctatccctattggcggtggcagcgccaatgtttatgtaaaccttgcgcctgccgtgaatgtggggcaaaacctggtcgtggatctttcgacgcaaatcttttgccataacgattacccggaaaccattacagactatgtcacactgcaacgaggttcggcttatggcagcgtgttatctagtttttccgggaccgtaaaatataatggcagtagctatcctttccctactaccagcgaaacgccgcgggttgtttataattcgagaacggataagccgtggccggtggcgctttatttgacgcctgtgagcagtgcggggggagtggcgattaaagctggctcattaattgccgtgcttattttgcgacagaccaacaactataacagcgatgatttccagtttgtgtggaatatttacgccaataatgatgtggtggtgcccactggcggctgtgatgtt

SEQ ID NO: 168 - DNA, 489 bp, Escherichia coli
ttcgcctgtaaaaccgccaatggtaccgttatccctattggcggtggcagcgctaatgtttatgtaaaccttgcgcctgccgtgaatgtggggcaaaacctggtcgtagatctttcgacgcaaatcttttgccataacgattatccggaaaccattacagactatgtcacactgcaacgaggctcggcttatggcggcgtgttatctaatttttccgggaccgtaaaatatagtggcagtagctatccatttccgaccaccagcgaaacgccgcgggttgtttataattcgagaacggataagccgtggccggtggcgctttatttgacgcctgtgagcagtgcgggcggggtggcgattaaagctggctcattaattgccgtgcttattttgcgacagaccaacaactataacagcgatgatttccagtttgtgtggaatatttacgccaataatgatgtggtggtgcctactggcggctgcgatgtt

SEQ ID NO: 169 - DNA, 489 bp, Escherichia coli
ttcgcctgtaaaaccgccaatggtaccgcaatccctattggcggtggcagcgccaatgtttatgtaaaccttgcgcctgccgtgaatgtggggcaaaacctggtcgtagatctttcgacgcaaatcttttgccataacgattacccggaaaccattacagactatgtcacactgcaacgaggttcggcttatggcggcgtgttatctaatttttccgggaccgtaaaatatagtggcagtagctatccatttccgaccaccagtgaaacgccgcgcgttgtttataattcgagaacggataagccgtggccggtggcgctttatttgacgcctgtgagcagtgcgggcggggtggcgattaaagctggttcattaattgccgtgcttattttgcgacagaccaacaactataacagcgatgattttcagtttgtgtggaatatttacgccaataatgatgtggtggtgcccactggcggctgcgatgtt

SEQ ID NO: 170 - DNA, 489 bp, Escherichia coli
ttcgcctgtaaaaccgccaatggtaccgtaatccctattggcggtggcagcgccaatgtttatgtaaaccttgcgcctgccgtgaatgtggggcaaaacctggtcgtagatctttcgacgcaaatcttttgccataacgattacccagaaatcattacagactatgtcacactgcaacgaggttcggcttatggcggcgtgttatctagtttttccgggaccgtaaaatataatggcagtagctatcctttccctactaccagcgaaacgccgcgggttgtttataattcgagaacggataagccgtggccggtggtgctttatttgacgccggtgagcagtgcggggggagtggcgattaaagctggctcattaattgccgtgcttattttgcgacagaccaacaactataacagcgatgatttccagtttgtgtggaatatttacgccaataatgatgtggtggtgcccactggcggctgtgatgct

SEQ ID NO: 171 - DNA, 489 bp, Escherichia coli
ttcgcctgtaaaaccgccaatggtaccgcaatccctattggcggtggcagcgccaatgtttatgtaaaccttgcgcctgccgtgaatgtggggcaaaacctggtcgtggatctttcgacgcaaatcttttgccataacgattacccggaaaccattacagattatgtcacactgcaacgaggctcggcttatggctgcgtgttatctaatttttccgggaccgtaaaatataatggcagtagctatcctttccctactaccagcgaaacgccgcgggttgtttataattcgagaacggataagccgtggccggtggcgctttatttgacgcctgtgagcagtgcggggggagtggcgattaaagctggctcattaattgccgtgcttattttgcgacagaccaacaactataacagcgatgatttccagtttgtgtggaatatttacgccaataatgatgtggtggtgcccactggcggctgcgatgtt

SEQ ID NO: 172 - DNA, 489 bp, Escherichia coli
ttcgcctgtaaaaccgccaatggtacagctatccctattggcggtggcagcgctaatgtttatgtaaaccttgcgcccgccgtgaatgtggggcaaaacctggtcgtagatctttcgacgcaaatcttttgccataacgattatccggaaaccattacagactatgtcacactgcaacgaggctcggcttatggcagcgtgttatctaatttttccgggaccgtaaaatatagtggcagtagctatccatttcctaccaccagcgaaacgccgcgcgttgtttataattcgagaacggataagccgtggccggtggcgctttatttgacgcctgtgagcagtgcgggcggggtggcgattaaagctggctcattaattgccgtgcttattttgcgacagaccaacaactataacagcgatgatttccagtttgtgtggaatatttacgccaataatgatgtggtggtgcccactggcggctgtgatgtt

SEQ ID NO: 173 - DNA, 489 bp, Escherichia coli
ttcgcctgtaaaaccgccaatggtaccgctatccctattggcggtggcagcgccaatgtttatgtaaaccttgcgcccgtcgtgaatgtggggcaaaacctggtcgtggatctttcgacgcaaatcttttgccataacgattatccggaaaccattacagactatgtcacactgcaacgaggctcggcttatggcggcgtgttatctaatttttccgggaccgtaaaatatagtggcagtagctatccatttcctaccaccagcgaaacgccgcgcgttgtttataattcgagaacggataagccgtggccggtggcgctttatttgacgcctgtgagcagtgcgggcggggtggcgattaaagctggctcattaattgccgtgcttattttgcgacagaccaacaactataactgcgatgatttccagtttgtgtggaatatttacgccaataatgatgtggtggtgcctactggcggctgcgatgtt

SEQ ID NO: 174 - DNA, 489 bp, Escherichia coli
ttcgcctgtaaaaccgccaatggtaccgctatccctattggcggtggcagcgccaatgtttatgtaaaccttgcgcctgccgtgaatgtggggcaaaacctggtcgtggatctttcgacgcaaatcttttgccataacgattatccggaaaccattacagactatgtcacactgcaacgaggctcggcttatggcggcgtgttatctaatttttccgggaccgtaaaatatagtggcagtagctatccatttcctaccaccagcgaaacgccgcgggttgtttataattcgagaacggataagccgtggccggtggcgctttatttgacgcctgtgagcagtgcgggcggggtggcgattaaagctggctcattaattgccgtgcttattttgcgacagaccaacaactataacagcgatgatttccagtttgtgtggaatatttacgccaataatgatgtggtggtgcctactggcggctgcgatgtt

SEQ ID NO: 175 - DNA, 489 bp, Escherichia coli
ttcgcctgtaaaaccgccaatggtaccgctatccctattggcggtggcagcgccaatgtttatgtaaaccttgcgcctgccgtgaatgtggggcaaaacctggtcgtggatctttcgacgcaaatcttttgccataacgattacccggaaaccattacagactatgtcacactgcaacgaggttcggcttatggcggcgtgttatctagtttttccgggaccgtaaaatataatggcagtagctatcctttccctactaccagcgaaacgccgcgggttgtttataattcgagaacggataagccgtggccggtggtgctttatttgacgcctgtgagcagtgcggggggagtggcgattaaagcaggctcattaattgccgtgcttattttgcgacagaccaacaactataacagcgatgatttccagtttgtgtggaatatttacgccaataatgatgtggtggtgcccactggcggctgcgatgtt

SEQ ID NO: 176 - DNA, 489 bp, Escherichia coli
ttcgcctgtaaaaccgccaatggtacagctatccctattggcggtggcagcgccaatgtttatgtaaaccttgcgcctgccgtgaatgtggggcaaaacctggtcgtagatctttcgacgcaaatcttttgccataacgattatccggaaaccattacagactatgtcacactgcaacgaggctcggcttatggcggcgtgttatctaatttttccgggaccgtaaaatatagtggtagtagctatccatttcctaccaccagtgaaacgccgcgcgttgtttataattcgagaacggataagccgtggccggtggcgctttatttgacgcctgtgagcagtgctggcggggtggcgattaaagctggttcattaattgccgtgcttattttgcgacagaccaacaactataacagcgatgattttcagtttgtgtggaatatttacgccaataatgatgtggtggtgcccactggcggctgcgatgtt

SEQ ID NO: 177 - DNA, 489 bp, Escherichia coli
ttcgcctgtaaaaccgccaatggtaccgcaatccctattggcggtggcagcgccaatgtttatgtaaaccttgcgcctgccgtgaatgtggggcaaaacctggtcgtagatctttcgacgcaaatcttttgccataacgattacccagaaaccattacagactatgtcacactgcaacgaggttcggcttatggcggcgtgttatctagtttttccgggaccgtaaaatataatggcagtagctatcctttccctactaccagcgaaacgccgcgggttgtttataattcgagaacggataagccgtggccggtggcgctttatttgacgccggtgagcagtgcggggggagtggcgattaaagctggctcattaattaccgtgcttattttgcgacagaccaacaactataacagcgatgatttccagtttgtgtggaatatttacgccaataatgatgtggtggtgcccactggcggctgtgatgtt

SEQ ID NO: 178 - DNA, 489 bp, Escherichia coli
ttcgcctgtaaaaccgccaatggtaccgctatccctattggcggtggcagcgccaatgtttatgtaaaccttgcgcctgccgtgaatgtggggcaaaacctggtcgtggatctttcgacgcaaatcttttgccataacgattacccggaaaccattacagactatgtcacactgcaacgaggttcggcttatggcggcgtgttatctagtttttccgggatcgtaaaatataatggcagtagctatcctttccctactaccagcgaaacgccgcgggttgtttataattcgagaacggataagccgtggccggtggcgctttatttgacgcctgtgagcagtgcggggggagtggtgattaaagcaggctcattaattgccgtgcttattttgcgacagaccaacaactataacagcgatgatttccagtttgtgtggaatatttacgccaataatgatgtggtggtgcccactggcggctgcgatgtt

SEQ ID NO: 179 - DNA, 489 bp, Escherichia coli
ttcgcctgtaaaaccgccaatggtaccgcaatccctattggcggtggcagcgccaatgtttatgtaaaccttgcgcctgccgtgaatgtggggcaaaacctggtcgtggatctttcgacgcaaatcttttgccataacgattacccggaaaccattacagattatgtcacactgcaacgaggctcggcttatggcggcgtgttatctaatttttccgggatcgtaaaatataatggcagtagctatcctttccctactaccagcgaaacgccgcgggttgtttataattcgagaacggataagccgtggccggtggcgctttatttgacgcctgtgagcagtgcggggggagtggcgattaaagctggctcattaattgccgtgctaattttgcgacagaccaacaactataacagcgatgatttccagtttgtgtggaatatttacgccaataatgatgtggtggtgcctactggcggctgtgatgtt

SEQ ID NO: 180 - DNA, 489 bp, Escherichia coli
ttcgcctgtaaaaccgccaatggtaccgctatccctattggcggtggcagcgctaatgtttatgtaaaccttgcgcctgtcgtgaatgtggggcaaaacctggtcgtagatctttcgacgcaaatcttttgccataacgattatccggaaaccattacagactatgtcacactgcaacgaggctcggcttatggcggcgtgttatctaatttttccgggaccgtaaaatatagtggcagtagctatccatttccgaccaccagcgaaacgccgcgggttgtttataattcgagaacggataagccgtggccggtggcgctttatttgacgcctgtgagcagtgcgggcggggtggcgattaaagctggctcattaattgccgtgcttattttgcgacagaccaacaactataacagcgatgatttccagtttgtgtggaatatttacgccaataatgatgtggtggtgcctactggcggctgcgatgtt

SEQ ID NO: 181 - DNA, 489 bp, Escherichia coli
ttcgcctgtaaaaccgctaatggtacggctattcctattggcggcggcagcgccaatgtctatgttaaccttgcgcccgcagtgaatgtggggcaaaacctagttgtggatctttcgacgcagatcttttgccataacgattacccggaaaccattacagactatgtaacactgcaacgaggttcagcttatggcggcgtgttatctaatttttccggaaccgtaaaatataatggcagtagctatccttttcctaccaccagcgaaacgccacgcgttgtttataattcgagaacggataagccctggccagtggcgctttatctgacgcctgtcagcagtgcgggcggagtggcgattaaggctggttcattaatagccgtgctcattttgcgccagaccaacaactataacggcgatgatttccagtttgtctggaatatttatgccaataacgatgtggtggtgcctaccggtggttgtgatgtt

SEQ ID NO: 182 - DNA, 489 bp, Escherichia coli
ttcgcttgtaaaaccgccaatggcaccgctatccctattggcggtggcagcgccaatgtttatgtaaaccttgcgcccgccgtgaatgtggggcaaaacctggtcgtggatctttcgacgcaaatcttttgccataacgattatccggaaaccattacagactatgtcacactgcaacgaggctcggcttatggctgcgtgttatctaatttttccgggaccgtaaaatatagtggcagtagctatccatttccgaccaccagcgaaacgccgcgcgttgtttataattcgagaacggataagccgtggccggtggcgctttatttgacgcctgtgagcagtgcgggcggggtggcgattaaagctggctcattaattgccgtgctaattttgcgacagaccaacaactataacagcgatgatttccagtttgtgtggaatatttacgccaataatgatgtggtggtgcctactggcggctgtgatgtt

SEQ ID NO: 183 - DNA, 489 bp, Escherichia coli
ttcgcctgtaaagccgccaatggtaccgctatccctattggcggtggcagcgccaatgtttatgtaaaccttgcgcctgctgtgaatgtggggcaaaacctggtcgtggatctttcgacgcaaatcttttgccataacgattacccggaaaccattacagattatgtcacactgcaacgaggctcggcttatggcggcgtgttatctaatttttccgggaccgtaaaatatagtggcagtagctatccatttcctaccaccagtgaaacgccgcgggttgtttataattcgagaacggataagccgtggccggtggcgctttatttgacgcctgtgagcagtgcgggcggggtggcgattaaagctggctcattaattgccatgcttattttgcgacagaccaacaactataacagcgatgatttccagtttgtgtggaatatttacgccaataatgatgtggtggtgcccactggcggctgtgatgtt

SEQ ID NO: 184 - DNA, 489 bp, Escherichia coli
ttcgcctgtaaaaccgccaatggtaccgcaatccctattggcggtggcagcgccaatgtttatgtaaaccttgcgcctgccgtgaatgtggggcaaaacctggtcgtagatctttcgacgcaaatcttttgccataacgattacccggaaaccattacagactatgtcacactgcaacgaggttcggcttatggcggcgtgttatctaatttttccgggaccgtaaaatatagtggcagtagctatccatttccgaccaccagtgaaacgccgcgcgttgtttataattcgagaacggataagccgtggccggtggcgctttatttgacgccggtgagcagtgcggggggagtggcgattaaagctggctcattaattgccgtgcttattttgcgacagaccaacaactataacagcgatgatttccagtttgtgtggaatatttacgccaataatgatgtggtggtgcccactggcggctgtgatgtt

SEQ ID NO: 185 - DNA, 489 bp, Escherichia coli
ttcgcctgtaaaaccgccaatggtaccgcaatccctattggcggtggcagcgccaatgtttatgtaaaccttgcgcctgccgtgaatgtggggcaaaacctggtcgtggatctttcgacgcaaatcttttgccataacgattacccggaaaccattacagactatgtcacactgcaacgaggttcggcttatggcggcgtgttatctagtttttccgggaccgtaaaatataatggcagtagctatcctttccctactaccagcgaaacgccgcgggttgtttataattcgagaacggataagccgtggccggtggcgctttatttgacgcctgtgagcagtgcggggggagtggcgattaaagctggctcattaattgccgtgcttattttgcgacagaccaacaactataacagcgatgatttccagtttgtgtggaatatttacgccaataatgatgtggtggtgcccactggcggctgtgatgtt

SEQ ID NO: 186 - DNA, 489 bp, Escherichia coli
ttcgcctgtaaaaccgccaatggtaccgctatccctattggcggtggcagcgccaatgtttatgtaaaccttgcgcctgccgtgaatgtggggcaaaacctggtcgtggatctttcgacgcaaatcttttgccataacgattacccggaaaccattacagactatgtcacactgcaacgaggttcggcttatggcggcgtgttatctagtttttcctggaccgtaaaatataatggcagtagctatcctttccctactaccagcgaaacgccgcgggttgtttataattcgagaacggataagccgtggccggtggcgctttatttgacgcctgtgagcagtgcggggggagtggcgattaaagcaggctcattaattgccgtgcttattttgcgacagaccaacaactataacagcgatgatttccagtttgtgtggaatatttacgccaataatgatgtggtggtgcccactggcggctgcgatgtt

SEQ ID NO: 187 - DNA, 489 bp, Escherichia coli
ttcgcctgtaaaaccgccaatggtactgctatccctattggcggtggcagcgccaatgtttatgtaaaccttgcgcctgccgtgaatgtggggcaaaacctggtcgtggatctttcgacgcaaatcttttgccataacgattacccggaaaccattacagactatgtcacactgcaacgaggttcggcttatggcggcgtgttatctagtttttccgggaccgtaaaatataatggcagtagctatcctttccctactaccagcgaaacgccgcgggttgtttataattcgagaacggataagccgtggccggtggcgctttatttgacgccggtgagcagtgcggggggagtggcgattaaagctggctcattaattgccgtgcttattttgcgacagaccaacaactataacagcgatgatttccagtttgtgtggaatatttacgccaataatgatgtggtggtgcccactggcggctgcgatgct

SEQ ID NO: 188 - DNA, 489 bp, Escherichia coli
ttcgcctgtaaaaccgccaatggtaccgctatccctattggcggtggcagcgccaatgtttatgtaaaccttgcgcctgccgtgaatgtggggcaaaacctggtcgtggatctttcgacgcaaatcttttgccataacgattatccggaaaccattacagactatgtcacactgcaacgaggctcggcttatggcggcgtgttatctaatttttccgggaccgtaaaatataatggcagtagctatccttttcctaccaccagcgaaacgccgcgcgttgtttataattcgagaacggataagccgtggccggtggcgctttatttgacgcctgtgagcagtgcgggcggggtggcgattaaagctggctcattaattgccgtgcttattttgcgacagaccaacaactataacagcgatgatttccagtttgtgtggaatatttacgccaataatgatgtggtggtgcctactggcggctgtgatgtt

SEQ ID NO: 189 - DNA, 489 bp, Escherichia coli
ttcgcctgtaaaaccgccaatggcaccgctatccctattggcggtggcagcgccaatgtttatgtaaaccttgcgcccgccgtgaatgtggggcaaaacctggtcgtagatctttcgacgcaaatcttttgccataacgattacccggaaaccattacagactatgtcacactgcaacgaggttcggcttatggcggcgtgttatctaatttttccgggaccgaaaaatatagtggcagtagctatccatttccgaccaccagcgaaacgccgcgggttgtttataattcgagaacggataagccgtggccggtggcgctttatttgacgcctgtgagcagtgcgggcggggtggcgattaaagctggctcattaattgccgtgcttattttgcgacagaccaacaactataacagcgatgatttccagtttgtgtggaatatttacgccaataatgatgtggtggtgcctactggcggctgcgatgtt

SEQ ID NO: 190 - DNA, 489 bp, Escherichia coli
ttcgcctgtaaaaccgccaatggtaccgctatccctattggcggtggcagcgccaatgtttatgtaaaccttgcgcccgccgtgaatgtggggcaaaacctggtcgtagatctttcgacgcaaatcttttgccataacgattacccggaaaccattacagactatgtcacactgcaacgaggttcggcttatggcggcgtgttatctaatttttccgggaccgtaaaatatagtggcagtagctatccatttccgaccaccagcgaaacgccgcgcgttgtttataattcgagaacggataagccgtggccggtggcgctttatttgacgcctgtgagcagtgcgggcggggtggcgattaaagctggttcattaattgccgtgcttattttgcgacagaccaacaactataacagcgatgattttcagtttgtgtggaatatttacgccaataatgatgtggtggtgcccactggcggctgcgatgtt

SEQ ID NO: 191 - DNA, 489 bp, Escherichia coli
ttcgcctgtaaaaccgctaatggtacggctatccctattggcggcggcagcgccaatgtctatgttaaccttgcgcccgcagtgaatgtggggcaaaacctggttgtggatctttcgacgcagatcttttgccataacgattacccggaaaccattacagactatgtaacactgcaacgaggttcagcttatggcggcgtgttatctaatttttccggaaccgtaaaatataatggcagtagctatccttttcctaccaccagcgaaacgccacgcgttgtttataattcgagaacggataagccctggccagtggcgctttatctgacgcctgtcagcagtgcgggcggagtggcgattaaggctggttcattaatagccgtgctcattttgcgccagaccaacaactataacggcgatgatttccagtttgtctggaatatttatgccaataacgatgtggtggtgcctaccggtggttgtgatgtt

SEQ ID NO: 192 - DNA, 489 bp, Escherichia coli
ttcgcctgtaaaaccgccaatggtaccgcaatccctattggcggtggcagcgccaatgtttatgtaaaccttgcgcctgccgtgaatgtggggcaaaacctggtcgtggatctttcgacgcaaatcttttgccataacgattacccggaaaccattacagattatgtcacactgcaacgaggctcggcttatggcggcgtgttatctaatttttccgggaccgtaaaatataatggcagtagctatcctttccctactaccagcgaaacgccgcgggttgtttataattcgagaacggataagccgtggccggtggtgctttatttgacgcctgtgagcagtgcggggggagtggcgattaaagctggctcattaattgccgtgctaattttgcgacagaccaacaactataacagcgatgatttccagtttgtgtggaatatttacgccaataatgatgtggtggtgcctactggcggctgtgatgtt

SEQ ID NO: 193 - DNA, 489 bp, Escherichia coli
ttcgcctgtaaaaccgccaatggtaccgcaatccctattggcggtggcagcgccaatgtttatgtaaaccttgcgcctgccgtgaatgtggggcaaaacctggtcgtggatctttcgacgcacatcttttgccataacgattacccggaaaccattacagattatgtcacactgcaacgaggctcggcttatggcggcgtgttatctaatttttccgggaccgtaaaatataatggcagtagctatcctttccctactaccagcgaaacgccgcgggttgtttataattcgagaacggataagccgtggccggtggcgctttatttgacgcctgtgagcagtgcggggggagtggcgattaaagctggctcattaattgccgtgctaattttgcgacagaccaacaactataacagcgatgatttccagtttgtgtggaatatttacgccaataatgatgtggtggtgcctactggcggctgtgatgtt

SEQ ID NO: 194 - DNA, 489 bp, Escherichia coli
ttcgcctgtaaaaccgccaatggtaccgctattcctattggcggtggcagcgctaatgtttatgtaaaccttgcgcctgccgtgaatgtggggcaaaacctggtcgtagatctttcgacgcaaatcttttgccataacgattatccggaaaccattacagactatgtcacactgcaacgaggctcggcttatggcggcgtgttatctaatttttccgggaccgtaaaatatagtggcagtagctatccatttccgactaccagcgaaacgccgcgggttgtttataattcgagaacggataagccgtggccggtggcgctttatttgacgcctgtgagcagtgcgggtggggtggcgattaaagctggctcattaattgccgtgcttattttgcgacagaccaacaactataacagcgatgatttcaagtttgtgtggaatatttacgccaataatgatgtggtggtgcctactggcggctgcgatgtt

SEQ ID NO: 195 - DNA, 489 bp, Escherichia coli
ttcgcctgtaaaaccgccaatggtaccgttattcctattggcggtggcagcgctaatgtttatgtaaaccttgcgcctgccgtgaatgtggggcaaaacctggtcgtagatctttcgacgcaaatcttttgccataacgattatccggaaaccattacagactatgtcacactgcaacgaggctcggcttatggcggcgtgttatctaatttttccgggaccgtaaaatatagtggcagtagctatccatttccgactaccagcgaaacgccgcgggttgtttataattcgagaacggataagccgtggccggtggcgctttatttgacgcctgtgagcagtgcgggtggggtggcgattaaagctggctcattaattgccgtgcttattttgcgacagaccaacaactataacagcgatgatttccagtttgtgtggaatatttacgccaataatgatgtggtggtgcctactggcggctgcgatgtt

SEQ ID NO: 196 - DNA, 489 bp, Escherichia coli
ttcgcctgtaaaaccgccaatggtaccgctatccctattggcggtggcagcgccaatgtttatgtaaaccttgcgcccgtcgtgaatgtggggcaaaacctggtcgtggatctttcgacgcaaatcttttgccataacgattatccggaaaccattacagactatgtcacactgcaacgaggctcggcttatggcggcgtgttatctaatttttccggggccgtaaaatatagtggcagtagctatccatttcctaccaccagcgaaacgccgcgcgttgtttataattcgagaacggataagccgtggccggtggcgctttatttgacgcctgtgagcagtgcgggcggggtggcgattaaagctggctcattaattgccgtgcttattttgcgacagaccaacaactataacagcgatgatttccagtttgtgtggaatatttacgccaataatgatgtggtggtgcctactggcggctgcgatgtt

SEQ ID NO: 197 - DNA, 489 bp, Escherichia coli
ttcgcctgtaaaaccgccaatggtaccgctatccctattggcggtggcagcgccaatgtttatgtaaatcttgcgcccgccgtgaatgtggggcaaaacctggtcgtggatctttcgacgcaaatcttttgccataacgattatccggaaaccattacagactatgtcacactgcaacgaggctcggcttatggcggcgtgttatcaaatttttccgggaccgtaaaatatagtggcagtagctatccatttcctaccaccagcgaaacgccgcgcgttgtttataattcgagaacggataagccgtggccggtggcgctttatttgacgcctgtgagcagtgcgggcggggtggcgattaaagctggctcattaattgccgtgcttattttgcgacagaccaacaactataacagcgatgattttcagtttgtgtggaatatttacgccaataatgatgtggtggtgcctactggcggctgcgatgtt

SEQ ID NO: 198 - DNA, 489 bp, Escherichia coli
ttcgcctgtaaaaccgccaatggcaccgctatccctattggcggtggcagcgccaatgtttatgtaaaccttgcgcccgccgtgaatgtggggcaaaacctggtcgtagatctttcgacgcaaatcttttgccataacgattacccggaaaccattacagactatgtcacactgcaacgaggttcggcttatggcggcgtgttatctaatttttccgggaccgtaaaatatagtggcagtagctatccatttcctaccaccagcgaaacgccgcgcgttgtttataattcgagaacggataagccgtggccggtggcgctatatttgacgcctgtgagcagtgcgggtggggtggcgattaaagctggttcattaattgccgtgcttattttgcgacagaccaacaattataacagcgatgattttcagtttgtgtggaatatttacgccaataatgatgtggtggtgcccactggcggctgcgatgtt

SEQ ID NO: 199 - DNA, 489 bp, Escherichia coli
ttcgcctgtaaaaccgccaatggcaccgctatccctattggcggtggcagcgccaatgtttatgtaaaccttgcgcccgccgtgaatgtggggcaaaacctggtcgtagatctttcgacgcaaatcttttgccataacgattacccggaaaccattacagactatgtcacactgcaacgaggttcggcttatggcggcgtgttatctaatttttccgggaccgtaaaatatagtggcagtagctatccatttccgaccaccagtgaaacgccgcgcgttgtttataattcgagaacggataagccgtggccggtggcgctttatttgacgcctgtgagcagtgcgggcggggtggcgattaaagctggttcattaattgccgtgcttattttgcgacagaccaacaactataacagcgatgattttcagtttgtgtggaatatttacgccaataatgatgtggtggtgcccactggcggctgcgatgtt

SEQ ID NO: 200 - DNA, 489 bp, Escherichia coli
ttcgcctgtaaaaccgccaatggcaccgctatccctattggcggtggcagcgccaatgtttatgtaaaccttgcgcccgccgtgaatgtggggcaaaacctggtcgtagatctttcgatgcaaatcttttgccataacgattacccggaaaccattacagactatgtcacactgcaacgaggctcggcttacggcggtgtgttatctaatttttccgggaccgtaaaatatagtggcagtagctatccatttccgaccaccagcgaaacgccgcgcgttgtttataattcgagaacggataagccgtggccggtggcgctttatttgacgcctgtgagcagtgcgggcggggtggcgattaaagctggttcattaattgccgtgcttattttgcgacagaccaacaactataacagcgatgattttcagtttgtgtggaatatttacgccaataatgatgtggtggtgcccactggcggctgcgatgtt

SEQ ID NO: 201 - DNA, 489 bp, Escherichia coli
ttcgcctgtaaaaccgccaatggtgccgctatccctattggcggtggcagcgccaatgtttatgtaaaccttgcgcccgccgtgaatgtggggcaaaacctggtcgtagatctttcgacgcaaatcttttgccataacgattacccggaaaccattacagactatgtcacactgcaacgaggttcggcttatggcggcgtgttatctaatttttccgggaccgtaaaatatagtggcagtagctatccatttccgaccaccagtgaaacaccgcgcgttgtttataattcgagaacggataagccgtggccggtggcgctttatttgacgcctgtgagcagtgcgggcggggtggcgattaaagctggctcattaattgccgtgcttattttgcgacagaccaacaactataacagcgatgatttccagtttgtgtggaatatttacgccaataatgatgtggtggtgcctactggcggctgcgatgtt

SEQ ID NO: 202 - DNA, 489 bp, Escherichia coli
ttcgcctgtaaaaccgccaatggcaccgctatccctattggcggtggcagcgccaatgtttatgtaaaccttgcgcccgccgtgaatgtggggcaaaacctggtcgtagatctttcgacgcaaatcttttgccataacgattacccggaaaccattacagactatgtcacactgcaacgaggttcggcttatggcggcgtgttatctaatttttccgggaccgtaaaatatagtggtagtagctatccatttccgaccaccagtgaaacaccgcgcgttgtttataattcgagaacggataagccgtggccggtggcgctttatttgacgcctgtgagcagtgcgggcggggtggcgattaaagctggctcattaattgccgtgcttattttgcgacagaccaacaactataacagcgatgatttccagtttgtgtggaatatttacgccaataatgatgtggtggtgcctactggcggctgcgatgtt

SEQ ID NO: 203 - DNA, 489 bp, Escherichia coli
ttcgcctgtaaaaccgccaatggtaccgctatccctattggcggtggcagcgccaatgtttatgtaaaccttgcgcctgccgtgaatgtggggcaaaacctggtcgtggatctttcgacgcaaatcttttgccataacgattacccggaaaccattacagactatgtcacactgcaacgaggttcggcttatggcggcgtgttatctagtttttccgggaccgtaaaatataatggcagtagctatcctttccctactaccagcgaaacgccgcgggttgtttataattcgagaacggataagccgtggccggtggcgctttatttgacgcctgtgagcagtgcgaggggagtggcgattaaagcaggctcattaattgccgtgcttattttgcgacagaccaacaactataacagcgatgatttccagtttgtgtggaatatttacgccaataatgatgtggtggtgcccactggcggctgcgatgtt

SEQ ID NO: 204 - DNA, 489 bp, Escherichia coli
ttcgcctgtaaaaccgccaatggtaccgctatccctattggcggtggcagcgccaatgtttatgtaaaccttgcgcctgccgtgaatgtggggcaaaacctgatcgtggatctttcgacgcaaatcttttgccataacgattacccggaaaccattacagactatgtcacactgcaacgaggttcggcttatggcggcgtgttatctagtttttccgggaccgtaaaatataatggcagtagctatcctttccctactaccagcgaaacgccgcgggttgtttataattcgagaacggataagccgtggccggtggcgctttatttgacgcctgtgagcagtgcggggggagtggcgattaaagcaggctcattaattgccgtgcttattttgcgacagaccaacaactataacagcgatgatttccagtttgtgtggaatatttacgccaataatgatgtggtggtgcccactggcggctgcgatgtt

SEQ ID NO: 205 - DNA, 489 bp, Escherichia coli
ttcgcctgtaaaaccgccaatggtaccgctatccctattggcggtggcagcgccaatgtttatgtaaaccttgcgcctgccgtgaatgtggggcaaaacctggtcgtggatctttcgacgcaaatcttttgccataacgattacccggaaaccattacagactatgtcacactgcaacgaggttcggcttatggcgtcgtgttatctagtttttccgggagcgtaaaatataatggcagtagctatcctttccctactaccagcgaaacgccgcgggttgtttataattcgagaacggataagccgtggccggtggcgctttatttgacgcctgtgagcagtgcggggggagtggcgattaaagcaggctcattaattgccgtgcttattttgcgacagaccaacaactataacagcgatgatttccagtttgtgtggaatatttacgccaataatgatgtggtggtgcccactggcggctgcgatgtt

SEQ ID NO: 206 - DNA, 489 bp, Escherichia coli
ttcgcctgtaaaaccgccaatggtaccgcaatccctattggcggtggcagcgccaatgtttatgtaaaccttgcgcctgccgtgaatgtggggcaaaacctggtcgtggatctttcgacgcaaatcttttgccataacgattacccggaaaccattacagactatgtcacactgcaacgaggttcggcttatggcagcgtgttatctagtttttccgggaccgtaaaatataatggcagtagctatcctttccctactaccagcgaaacgccgcgggttgtttataattcgagaacggataagccgtggccggtggcgctttatttgacgcctgtgagcagtgcggggggagtggcgattaaagcaggctcattaattgccgtgcttattttgcgacagaccaacaactataacagcgatgatttccagtttgtgtggaatatttacgccaataatgatgtggtggtgcccactggcggctgcgatgtt

SEQ ID NO: 207 - DNA, 489 bp, Escherichia coli
ttcgcctgtaaaaccgccaatggtaccgctatccctattggcggtggcagcgccaatgtttatgtaaaccttgcgcctaccgtgaatgtggggcaaaacctggtcgtggatctttcgacgcaaatcttttgccataacgattacccggaaaccattacagactatgtcacactgcaacgaggttcggcttatggcggcgtgttatctagtttttccgggaccgtaaaatataatggcagtagctatcctttctctactaccagcgaaacgccgcgggttgtttataattcgagaacggataagccgtggccggtggcgctttatttgacgcctgtgagcagtgcggggggagtggcgattaaagcaggctcattaattgccgtgcttattttgcgacagaccaacaactataacagcgatgatttccagtttgtgtggaatatttacgccaataatgatgtggtggtgcccactggcggctgcgatgtt

SEQ ID NO: 208 - DNA, 489 bp, Escherichia coli
ttcgcctgtaaaaccgccaatggtaccgctatccctattggcggtggcagcgccaatgtttatgtaaaccttgcgcctgccgtgaatgtggggcaaaacctggtcgtggatctttcgacaaaaatcttttgccataacgattacccggaaaccattacagactatgtcacactgcaacgaggttcggcttatggcggcgtgttatctagtttttccgggaccgtaaaatataatggcagtagctatcctttccctactaccagcgaaacgccgcgggttgtttataattcgagaacggataagccgtggccggtggcgctttatttgacgcctgtgagcagtgcggggggagtggcgattaaagcaggctcattaattgccgtgcttattttgcgacagaccaacaactataacagcgatgatttccagtttgtgtggaatatttacgccaataatgatgtggtggtgcccactggcggctgcgatgtt

SEQ ID NO: 209 - DNA, 489 bp, Escherichia coli
ttcgcctgtaaaaccgccaatggtaccgctatccctattggcggtggcagcgccaatgtttatgtaaaccttgcgcctgccgtgaatgtggggcaaaacctggtcgtggatctttcgacgcaaatcttttgccataacgattacccggaaaccattacagactatgtcacactgcaccgaggttcggcttatggcggcgtgttatctagtttttccgggaccgtaaaatataatggcagtagctatcctttccctactaccagcgaaacgccgcgggttgtttataattcgagaacggataagccgtggccggtggcgctttatttgacgcctgtgagcagtgcggggggagtggcgattaaagctggctcattaattgccgtgcttattttgcgacagaccaacaactataacagcgatgatttccagtttgtgtggaatatttacgccaataatgatgtggtggtgcccactggcggctgtgatgtt

SEQ ID NO: 210 - DNA, 489 bp, Escherichia coli
ttcgcctgtaaaaccgccaatggtaccgctatccctattggcggtggcagcgccaatgtttatgtaaaccttgcgcctgccgtgaatgtggggcaaaacctggtcgtggatctttcgacgcaaatcttttgccataacgattacccggaaaccattacagactatgtcacactgcaacgaggttcggcttatggcggcgtgttatctagtttttccgggaccgtaaaatataatggcagtagctatcctttccctactaccagcgaaacgccgcgggttgtttataattcgagaacggataagccgtggccggtggcgctttatttgacgcctgtgagcagtgcggggggagtggcgattaaagctggctcattaattgccgtgcttattttgcgacagaccaacaactataacagcgatgatttccagtttgtgtggaatatttacgccaataatgatgtggtggtgcccactggcggctgtgatgct

SEQ ID NO: 211 - DNA, 489 bp, Escherichia coli
ttcgcctgtaaaaccgccaatggtaccgctatccctattggcggtggcagcgccaatgtttatgtaaaccttgcgcctgccgtgaatgtggggcaaaacctggtcgtggatctttcgacgcaaatcttttgccataacgattacccggaaaccattacagactatgtcacactgcaacgaggttcggcttatggctgcgtgttatctagtttttccgggaccgtaaaatataatggcagtagctatcctttccctactaccagcgaaacgccgcgggttgtttataattcgagaacggataagccgtggccggtggcgctttatttgacgcctgtgagcagtgcggggggagtggcgattaaagctggctcattaattgccgtgcttattttgcgacagaccaacaactataacagcgatgatttccagtttgtgtggaatatttacgccaataatgatgtggtggtgcccactggcggctgtgatgtt

SEQ ID NO: 212 - DNA, 489 bp, Escherichia coli
ttcgcctgtaaaaccgccaatggtaccgcaatccctattggcggtggcagcgccaatgtttatgtaaaccttgcgcctgccgtgaatgtggggcaaaacctggtcgtggatctttcgacgcgaatcttttgccataacgattacccggaaaccattacagattatgtcacactgcaacgaggctcggcttatggcggcgtgttatctaatttttccgggaccgtaaaatataatggcagtagctatcctttccctactaccagcgaaacgccgcgggttgtttataattcgagaacggataagccgtggccggtggcgctttatttgacgcctgtgagcagtgcggggggagtggcgattaaagctggctcattaattgccgtgctaattttgcgacagaccaacaactataacagcgatgatttccagtttgtgtggaatatttacgccaataatgatgtggtggtgcctactggcggctgtgatgtt

SEQ ID NO: 213 - DNA, 489 bp, Escherichia coli
ttcgcctgtaaaaccgccaatggtaccgcaatccctattggcggtggcagcgccaatgtttatgtaaaccttgcgcctgccgtgaatgtggggcaaaacctggtcgtagatctttcgacgcaaatcttttgccataacgattacccagaagccattacagactatgtcacactgcaacgaggttcggcttatggcagcgtgttatctagtttttccgggaccgtaaaatataatggcagtagctatcctttccctactaccagcgaaacgccgcgggttgtttataattcgagaacggataagccgtggccggtggtgctttatttgacgccggtgagcagtgcggggggagtggcgattaaagctggctcattaattgccgtgcttattttgcgacagaccaacaactataacagcgatgatttccagtttgtgtggaatatttacgccaataatgatgtggtggtgcccactggcggctgtgatgtt

SEQ ID NO: 214 - DNA, 489 bp, Escherichia coli
ttcgcctgtaaaaccgccaatggtaccgcaatccctattggcggtggcagcgccaatgtttatgtaaaccttgcgcctgccgtgaatgtggggcaaaacctggtcgtagatctttcgacgcaaatcttttgccataacgattacccagaaaccattacagactatgtcacactgcaacgaggttcggcttatggcggcgtgttatctagtttttccgggaccgtaaaatataatggcagtagctatcctttccctactaccagcgaaacgccgcgggttgtttataattcgagaacggataagccgtggccggtggtgctttatttgacgccggtgagcagtgcggggggagtggcgattaaagctggctcattaattgccgtgcttattttgcgacagaccaacaactataacagcgatgatttccagtttgtgtggaatatttacgccaataatgatgtggtggtgcccactggcggctgtgatgct

SEQ ID NO: 215 - DNA, 489 bp, Escherichia coli
ttcgcctgtaaaaccgccaatggtaccgcaatccctattggcggtggcagcgccaatgtttatgtaaaccttgcgcctgccgtgaatgtggggcaaaacctggtcgtagatctttcgacgcaaatcttttgccataacgattacccagaaaccattacagactatgtcacactgcaacgaggttcggcttatggcggcgtgttatctagtttttccgggaccgtaaaatataatggcagtagctatcctttccctactaccagcgaaacgccgcgggttgtttataattcgagaacggataagccgtggccggtggcgctttatttgacgccggtgagcagtgcggggggagtggcgattaaagctggctcattaatggccgtgcttattttgcgacagaccaacaactataacagcgatgatttccagtttgtgtggaatatttacgccaataatgatgtggtggtgcccactggcggctgtgatgtt

SEQ ID NO: 216 - DNA, 489 bp, Escherichia coli
ttcgcctgtaaaaccgccaatggtaccgcaatccctattggcggtggcagcgccaatgtttatgtaaaccttgcgcctgccgtgaatgtggggcaaaacctggtcgtggatctttcgacgcaaatcttttgccataacgattacccggaaaccattacagactatgtcacactgcaacgaggttcggcttatggcagcgtgttatctagtttttccgggaccgtaaaatataatggcagtagctatcctttccctactaccagcgaaacgccgcgggttgtttataattcgagaacggataagccgtggccggtggcgctttatttgacgccggtgagcagtgcggggggagtggcgattaaagctggctcattaattgccgtgcttattttgcgacagaccaacaactataacagcgatgatttccagtttgtgtggaatatttacgccaataatgatgtggtggtgcccactggcggctgtgatgtt

SEQ ID NO: 217 - DNA, 489 bp, Escherichia coli
ttcgcctgtaaaaccgccaatggtaccgcaatccctattggcggtggcagcgccaatgtttatgtaaaccttgcgcctgccgtgaatgtggggcaaaacctggtcgtagatctttcgacgcaaatcttttgccataacgattacccagaaaccattacagactatgtcacactgcaacgaggttcggcttatggcggcgtgttatctagtttttccgggaccgtaaaatataatggcagtagctatcctttccctactaccagcgaaacgccgcgggttgtttataattcgagaacggataagccgtggccggtggcgctttatttgacgccggtgagcagtgcgggcggggtggcgattaaagctggctcattaattgccatgcttattttgcgacagaccaacaactataacagcgatgatttccagtttgtgtggaatatttacgccaataatgatgtggtggtgcccactggcggctgtgatgtt

SEQ ID NO: 218 - DNA, 489 bp, Escherichia coli
ttcgcttgtaaaaccgccaatggcaccgctatccctattggcggtggcagcgccaatgtttatgtaaaccttgcgcccgccgtgaatgtggggcaaaacctggtcgtggatctttcgacgcaaatcttttgccataacgattatccggaaaccattacagactatgtcacactgcaacgaggctcggcttatggcgccgtgttatctaatttttccgggaccgtaaaatatagtggcagtagctatccatttccgaccaccagcgaaacgccgcgcgttgtttataattcgagaacggataagccgtggccggtggcgctttatttgacgcctgtgagcagtgcgggcggggtggcgattaaagctggctcattaattgccgtgctaattttgcgacagaccaacaactataacagcgatgatttccagtttgtgtggaatatttacgccaataatgatgtggtggtgcctactggcggctgtgatgtt

SEQ ID NO: 219 - DNA, 489 bp, Escherichia coli
ttcgcctgtaaaaccgccaatggtaccgctattcctattggcggtggcagcgctaatgtttatgtaaaccttgcgcctgccgtgaatgtggggcaaaacctggtcgtagatctttcgacgcaaatcttttgccataacgattatccggaaaccattacagactatgtcacactgcaacgaggctcggcttatggcggcgtgttatctaatttttccgggaccgtaaaatatagtggcagtagctatccatttccgaccaccagcgaaacgccgcgcgttgtttataattcgagaacggataagccgtggccggtggcgctttatttgacgcctgtgagcagtgcgggcggggtggcgattaaagctggctcattaattgccgtgcttattttgcgacagaccaacaactataacagcgatgatttccagtttgtgtggaatatttacgccaataatgatgtggtggtgcctactggcggctgtgatgtt

SEQ ID NO: 220 - DNA, 489 bp, Escherichia coli
ttcgcctgtaaaaccgccaatggtacagctatccctattggcggtggcagcgccaatgtttatgtaaaccttgcgcccgccgtgaatgtggggcaaaacctggtcgtagatctttcgacgcaaatcttttgccataacgattatccggaaaccattacagactatgtcacactgcaacgaggctcggcttatggcggcgtgttatctaatttttccgggaccgtaaaatatagtggcagtagctatccatttcctaccaccagcgaaacgccgcgcgttgtttataattcgagaacggataagccgtggccggtggcgctttatttgatgcctgtgagcagtgcgggcggggtggcgattaaagctggctcattaattgccgtgcttattttgcgacagaccaacaactataacagcgatgatttccagtttgtgtggaatatttacgccaataatgatgtggtggtgcccactggcggctgtgatgtt

SEQ ID NO: 221 - DNA, 489 bp, Escherichia coli
ttcgcctgtaaaaccgccaatggtacagctatccctattggcggtggcagcgctaatgtttatgtaaaccttgcgcccgccgtgaatgtggggcaaaacctggtcgtagatctttcgacgcaaatcttttgccataacgattatccggaaaccattacagactatgtcacactgcaacgaggctcggcttatggcggcgtgttatctaatttttccgggaccgtaaaatatagtggcagtagctatccatttcctaccaccagcgaaacgtcgcgcgttgtttataattcgagaacggataagccgtggccggtggcgctttatttgacgcctgtgagcagtgcgggcggggtggcgattaaagctggctcattaattgccgtgcttattttgcgacagaccaacaactataacagcgatgatttccagtttgtgtggaatatttacgccaataatgatgtggtggtgcccactggcggctgtgatgtt

SEQ ID NO: 222 - DNA, 489 bp, Escherichia coli
ttcgcctgtaaaaccgccaatggtacagctatccctattggcggtggcagcgctaatgtttatgtaaaccttgcgcctgccgtgaatgtggggcaaaacctggtcgtagatctttcgacgcaaatcttttgccataacgattatccggaaaccattacagactatgtcacactgcaacgaggctcggcttatggcagcgtgttatctaatttttccgggaccgtaaaatatagtggcagtagctatccatttccgaccaccagcgaaacgccgcgggttgtttataattcgagaacggataagccgtggccggtggcgctttatttgacgcctgtgagcagtgcgggcggggtggcgattaaagctggctcattaattgccgtgcttattttgcgacagaccaacaactataacagcgatgatttccagtttgtgtggaatatttacgccaataatgatgtggtggtgcctactggcggctgcgatgtt

SEQ ID NO: 223 - DNA, 489 bp, Escherichia coli
ttcgcctgtaaaaccgccaatggtaccgctatccctattggcggtggcagcgctaatgtttatgtaaaccttgcgcctgccgtgaatgtggggcaaaacctggtcgtggatctttcgacgcagatcttttgccataacgattatccggaaaccattacagactatgtcacactgcaacgaggctcggcttatggcggcgtgttatctaatttttccgggaccgtaaaatatagtggcagtagctatccatttccgaccaccagcgaaacgccgcgggttgtttataattcgagaacggataagccgtggccggtggcgctttatttgacgcctgtgagcagtgcgggcggggtggcgattaaagctggctcattaattgccgtgcttattttgcgacagaccaacaactataacagcgatgatttccagtttgtgtggaatatttacgccaataatgatgtggtggtgcctactggcggctgcgatgtt

SEQ ID NO: 224 - DNA, 489 bp, Escherichia coli
ttcgcctgtaaaaccgccaatggtaccgctattcctattggcggtggcagcgctaatgtttatgtaaaccttgcgcctgccgtgaatgtggggcaaaacctggtcgtagatctttcgacgcaaatcttttgccataacgattatccggaaaccattacagactatgtcacactgcaacgaggctcggcttatggcggcgtgttatctaatttttccgggaccgtaaaatatagtggcagtagctatccatttccgactactagcgaaacgccgcgggttgtttataattcgagaacggataagccgtggccggtggcgctttatttgacgcctgtgagcagtgcgggtggggtggcgattaaagctggctcattaattgccgtgcttattttgcgacagaccaacaactataacagcgatgatttccagtttgtgtggaatatttacgccaataatgatgtggtggtgcctactggcggctgcgatgtt

SEQ ID NO: 225 - DNA, 489 bp, Escherichia coli
ttcgcctgtaaaaccgccaatggtaccgctatccctattggcggtggcagcgccaatgtttatgtaaaccttgcgcctgctgtgaatgtggggcaaaacctggtcgtggatctttcgacgcaaatcttttgccataacgattacccggaaaccattacagattatgtcacactgcaacgaggctcggcttatggcggcgtgttatctaatttttccgggaccgtaaaatatagtggcagtagctatccatttcctaccaccagtgaaacgccgcgggttgtttataattcgagaacggataagccgtggccggtggcgctttatttgacgcctgtgagcagtgcgggcggggtggcgattaaagctggctcattaattgccatgcttattttgcgacagaccaacaactataacagcgatgatttccagtttgtgtggaatatttacgccaataatgatgtggtggtgcccactggcggctgtgatgtt

SEQ ID NO: 226 - DNA, 489 bp, Escherichia coli
ttcgcctgtaaaaccgccaatggcaccgctatccctattggcggtggcagcgccaatgtttatgtaaaccttgcgcccgccgtgaatgtggggcaaaacctggtcgtggatctttcgacgcaaatcttttgccataacgattacccggaaaccattacagattatgtcacactgcaacgaggctcggcttatggcggcgtgttatctaatttttccgggaccgtaaaatatagtggcagtagctatccatttccgaccaccagtgaaacgccgcgggttgtttataattcgagaacggataagccgtggccggtggcgctttatttgacgcctgtgagtagtgcgggcggggtggtgattaaagctggctcattaattgccgtgcttattttgcgacagaccaacaactataacagcgatgatttccagtttgtgtggaatatttacgccaataatgatgtggtggtgcccactggcggctgcgatgtt

SEQ ID NO: 227 - DNA, 489 bp, Escherichia coli
ttcgcctgtaaaaccgccaatggcaccgttatccctattggcggtggcagcgccaatgtttatgtaaaccttgcgcccgccgtgaatgtggggcaaaacctggtcgtagatctttcgacgcaaatcttttgccataacgattacccggaaaccattacagactatgtcacactgcaacgaggttcggcttatggcggcgtgttatctaatttttccgggaccgtaaaatatagtggcagtagctatccatttccgaccaccagtgaaacgccgcgcgttgtttataattcgagaacggataagccgtggccggtggcgctttatttgacgcctgtgagcagtgcgggcggggtggcgattaaagctggctcattaattgccgtgcttattttgcgacagaccaacaactataacagcgatgatttccagtttgtgtggaatatttacgccaataatgatgtggtggtgcctactggcggctgcgatgtt

SEQ ID NO: 228 - DNA, 489 bp, Escherichia coli
ttcgcctgtaaaaccgccaatggtaccgctatccctattggcggtggcagcgccaatgtttatgtaaaccttgcgcctgccgtgaatgtggggcaaaacctggtcgtggatctttcgacgcaaatcttttgccataacgattacccggaaaccattacagactatgtcacactgcaacgaggttcggcttatggcgtcgtgttatctagtttttccgggaccgtaaaatataatggcagtagctatcctttccctactaccagcgaaacgccgcgggttgtttataattcgagaacggataagccgtggccggtggcgctttatttgacgcctgtgagcagtgcggggggagtggcgattaaagcaggctcattaattgccgtgcttattttgcgacagaccaacaactataacagcgatgatttccagtttgtgtggaatatttacgccaataatgatgtggtggtgcccactggcggctgcgatgtt

SEQ ID NO: 229 - DNA, 489 bp, Escherichia coli
ttcgcctgtaaaaccgccaatggtaccgctatccctattggcggtggcagcgccaatgtttatgtaaaccttgcgcctgccgtgaatgtggggcaaaacctggtcgtggatctttcgacgcaaatcttttgccataacgattacccggaaaccattacagactatgtcacactgcaacgaggttcggcttatggcagcgtgttatctagtttttccgggaccgtaaaatataatggcagtagctatcctttccctactaccagcgaaacgccgcgggttgtttataattcgagaacggataagccgtggccggtggcgctttatttgacgcctgtgagcagtgcggggggagtggcgattaaagcaggctcattaattgccgtgcttattttgcgacagaccaacaactataacagcgatgatttccagtttgtgtggaatatttacgccaataatgatgtggtggtgcccactggcggctgcgatgtt

SEQ ID NO: 230 - DNA, 489 bp, Escherichia coli
ttcgcctgtaaaaccgccaatggtaccgctatccctattggcggtggcagcgccaatgtttatgtaaaccttgcgcctgccgtgaatgtggggcaaaacctggtcgtggatctttcgacgcaaatcttttgccataacgattacccggaaaccattacagactatgtcacactgcaacgaggttcggcttatggcggcgtgttatctaatttttccgggaccgtaaaatataatggcagtagctatcctttccctactaccagcgaaacgccgcgggttgtttataattcgagaacggataagccgtggccggtggcgctttatttgacgcctgtgagcagtgcggggggggtggcgattaaagctggctcattaattgccgtgcttattttgcgacagaccaacaactataacagcgatgatttccagtttgtgtggaatatttacgccaataatgatgtggtggtgcccactggcggctgcgatgtt

SEQ ID NO: 231 - DNA, 489 bp, Escherichia coli
ttcgcctgtaaaaccgccaatggtaccactatccctattggcggtggcagcgccaatgtttatgtaaaccttgcgcctgtcgtgaatgtggggcaaaacctggtcgtggatctttcgacgcaaatcttttgccataacgattacccggaaaccattacagactatgtcacactgcaacgaggttcggcttatggcggcgtgttatctagtttttccgggaccgtaaaatataatggcagtagctatcctttccctactaccagcgaaacgccgcgggttgtttataattcgagaacggataagccgtggccggtggcgctttatttgacgcctgtgagcagtgcggggggagtggcgattaaagcaggctcattaattgccgtgcttattttgcgacagaccaacaactataacagcgatgatttccagtttgtgtggaatatttacgccaataatgatgtggtggtgcccactggcggctgcgatgtt

SEQ ID NO: 232 - DNA, 489 bp, Escherichia coli
ttcgcctgtaaaaccgccaatggtactgctatccctattggcggtggcagcgccaatgtttatgtaaaccttgcgcctgccgtgaatgtggggcaaaacctggtcgtggatctttcgacgcaaatcttttgccataacgattacccggaaaccattacagattatgtcacactgcaacgaggctcggcttatggcggcgtgttatctagtttttccgggaccgtaaaatataatggcagtagctatcctttccctactaccagcgaaacgccgcgggttgtttataattcgagaacggataagccgtggccggtggcgctttatttgacgcctgtgagcagtgcggggggagtggcgattaaagcaggctcattaattgccgtgcttattttgcgacagaccaacaactataacagcgatgatttccagtttgtgtggaatatttacgccaataatgatgtggtggtgcccactggcggctgcgatgtt

SEQ ID NO: 233 - DNA, 489 bp, Escherichia coli
ttcgcctgtaaaaccgccaatggtaccgctatccctattggcggtggcagcgccaatgtttatgtaaaccttgcgcctgccgtgaatgtggggcaaaacctggtcgtggatctttcgacgcaaatcttttgccataacgattacccggaaaccattacagactatgtcacactgcaacgaggttcggcttatggcggcgtgttatctagtttttccgggaccgtaaaatataatggcagtagctatcctttccctactaccagcgaaacgccgcgggttgtttataattcgagaacggataagccgtggccggtggtgctttatttgacgcctgtgagcagtgcggggggagtggtgattaaagctggctcattaattgccgtgcttattttgcgacagaccaacaactataacagcgatgatttccagtttgtgtggaatatttacgccaataatgatgtggtggtgcccactggcggctgtgatgtt

SEQ ID NO: 234 - DNA, 489 bp, Escherichia coli
ttcgcctgtaaaaccgccaatggtaccgcaatccctattggcggtggcagcgccaatgtttatgtaaaccttgcgcctgccgtgaatgtggggcaaaacctggtcgtggatctttcgacgcaaatcttttgccataacgattacccggaaaccattacagattatgtcacactgcaacgaggctcggcttatggcgacgtgttatctaatttttccgggaccgtaaaatataatggcagtagctatcctttccctactaccagcgaaacgccgcgggttgtttataattcgagaacggataagccgtggccggtggcgctttatttgacgcctgtgagcagtgcggggggagtggcgattaaagctggctcattaattgccgtgctaattttgcgacagaccaacaactataacagcgatgatttccagtttgtgtggaatatttacgccaataatgatgtggtggtgcctactggcggctgtgatgtt

SEQ ID NO: 235 - DNA, 489 bp, Escherichia coli
ttcgcctgtaaaaccgccaatggtaccgcaatccctattggcggtggcagcgccaatgtttatgtaaaccttgcgcctgtcgtgaatgtggggcaaaacctggtcgtggatctttcgacgcaaatcttttgccataacgattacccggaaaccattacagattatgtcacactgcaacgaggctcggcttatggtggcgtgttatctaatttttccgggaccgtaaaatataatggcagtagctatcctttccctactaccagcgaaacgccgcgggttgtttataattcgagaacggataagccgtggccggtggcgctttatttgacgcctgtgagcagtgcggggggagtggcgattaaagctggctcattaattgccgtgcttattttgcgacagaccaacaactataacagcgatgatttccagtttgtgtggaatatttacgccaataatgatgtggtggtgcccactggcggctgcgatgtt

SEQ ID NO: 236 - DNA, 489 bp, Escherichia coli
ttcgcctgtaaaaccgccaatggtaccgcaatccctattggcggtggcagcgccaatgtttatgtaaaccttgcgcctgccgtgaatgtggggcaaaacctggtcgtagatctttcgacgcgaatcttttgccataacgattacccagaaaccattacagactatgtcacactgcaacgaggttcggcttatggcggcgtgttatctagtttttccgggaccgtaaaatataatggcagtagctatcctttccctactaccagcgaaacgccgcgggttgtttataattcgagaacggataagccgtggccggtggcgctttatttgacgccggtgagcagtgcggggggagtggcgattaaagctggctcattaattgccgtgcttattttgcgacagaccaacaactataacagcgatgatttccagtttgtgtggaatatttacgccaataatgatgtggtggtgcccactggcggctgtgatgtt

SEQ ID NO: 237 - DNA, 489 bp, Escherichia coli
ttcgcctgtaaaaccgccaatggtaccgcaatccctattggcggtggcagcgccaatgtttatgtaaaccttgcgcctgccgtgaatgtggggcaaaacctggtcgtagatctttcgacgcaaatcttttgccataacgattacccagaaaccattacagactatgtcacactgcaacgaggttcggcttatggcggcgtgttatctagtttttccgggatcgtaaaatataatggcagtagctatcctttccctactaccagcgaaacgccgcgggttgtttataattcgagaacggataagccgtggccggtggcgctttatttgacgccggtgagcagtgcggggggagtggcgattaaagctggctcattaattgccgtgcttattttgcgacagaccaacaactataacagcgatgatttccagtttgtgtggaatatttacgccaataatgatgtggtggtgcccactggcggctgtgatgtt

SEQ ID NO: 238 - DNA, 489 bp, Escherichia coli
ttcgcctgtaaaaccgccaatggtaccgcaatccctattggcggtggcagcgccaatgtttatgtaaaccttgcgcctgccgtgaatgtggggcaaaacctggtcgtagatctttcgacgcaaatcttttgccataacgattacccagaaaccattacagactatgtcacactgcaacgaggttcggcttatggctgcgtgttatctagtttttccgggaccgtaaaatataatggcagtagctatcctttccctactaccagcgaaacgccgcgggttgtttataattcgagaacggataagccgtggccggtggcgctttatttgacgccggtgagcagtgcggggggagtggcgattaaagctggctcattaattgccgtgcttattttgcgacagaccaacaactataacagcgatgatttccagtttgtgtggaatatttacgccaataatgatgtggtggtgcccactggcggctgtgatgtt

SEQ ID NO: 239 - DNA, 489 bp, Escherichia coli
ttcgcctgtaaaaccgccaatggtaccgcaatccctattggcggtggcagcgccaatgtttatgtaaaccttgcgcctgccgtgaatgtggggcaaaacctggtcgtagatctttcgacgcaaatcttttgccataacgattacccagaaaccattacagactatgtcacactgcaacgaggttcggcttatggcggcgtgttatctagtttttccgggaccgtaaaatataatggcagtagctatcctttccctactaccagcgaaacgccgcgggttgtttataattcgggaacggataagccgtggccggtggcgctttatttgacgccggtgagcagtgcggggggagtggcgattaaagctggctcattaattaccgtgcttattttgcgacagaccaacaactataacagcgatgatttccagtttgtgtggaatatttacgccaataatgatgtggtggtgcccactggcggctgtgatgtt

SEQ ID NO: 240 - DNA, 489 bp, Escherichia coli
ttcgcctgtaaaaccgccaatggtaccgctattcctattggcggtggcagcgctaatgtttatgtaaaccttgcgcctgccgtgaatgtggggcaaaacctggtcgtagatctttcgacgcaaatcttttgccataacgattatccggaaaccattacagactatgtcacactgcaacgaggctcggcttatggcggcgtgttatctaatttttccgggaccgtaaaatatagtggcagtagctatccatttccgactaccagcgaaacgccgcgggttgtttataattcgagaacggataagccgtggccggtggcgctttatttgacgcctgtgagcagtgcgggtggggtggcgattaaagctggctcattaattgccgtgcttattttgcgacagaccaacaactataacagcaatgatttccagtttgtgtggaatatttacgccaataatgatgtggtggtgcctactggcggctgcgatgtt

SEQ ID NO: 241 - DNA, 489 bp, Escherichia coli
ttcgcctgtaaaaccgccaatggcaccgctatccctattggcggtggtagcgccaatgtttatgtaaaccttgcgcccgccgtgaatgtggggcaaaacctggtcgtggatctttcgacgcaaatcttttgccataacgattacccggaaaccattacagattatgtcacactgcaacgaggctcggcttatggcggcgtgttatctaatttttccgggaccgtaaaatatagtggcagtagctatccatttccgaccaccagtgaaacgccgcgggttgtttataattcgagaacggataagccgtggccggtggcgctttatttgacgcctgtgagcagtgcgggcggggtggtgattaaagctggctcattaattgccgtgcttattttgcgacagaccaacaactataacagcgatgatttccagtttgtgtggaatatttacgccaataatgatgtggtggtgcccactggcggctgcgatgtt

SEQ ID NO: 242 - DNA, 489 bp, Escherichia coli
ttcgcctgtaaagccgccaatggtaccgcaatccctattggcggtggcagcgccaatgtttatgtaaaccttgcgcctgccgtgaatgtggggcaaaacctggtcgtagatctttcgacgcaaatcttttgccataacgattacccagaaaccattacagactatgtcacactgcaacgaggttcggcttatggcggcgtgttatctagtttttccgggaccgtaaaatataatggcagtagctatcctttccctactaccagcgaaacgccgcgggttgtttataattcgagaacggataagccgtggccggtggcgctttatttgacgccggtgagcagtgcggggggagtggcgattaaagctggctcattaattgccgtgcttattttgcgacagaccaacaactataacagcgatgatttccagtttgtgtggaatatttacgccaataatgatgtggtggtgcccactggcggctgtgatgct

SEQ ID NO: 243 - DNA, 489 bp, Escherichia coli
ttcgcctgtaaaaccgccaatggtaccgctatccctattggcggtggcagcgctaatgtttatgtaaaccttgcgcctgccgtgaatgtggggcaaaacctggtcgtagatctttcgacgcaaatcttttgccataacgattatccggaaaccattacagactatgtcacactgcaacgaggctcggcttatggcggcgtgttatctaatttttccgggatcgtaaaatatagtggcagtagctatccatttccgaccaccagcgaaacgccgcgcgttgtttataattcgagaacggataagccgtggccggtggcgctttatttgacgcctgtgagcagtgcgggcggggtggcgattaaagctgactcattaattgccgtgcttattttgcgacagaccaacaactataacagcgatgatttccagtttgtgtggaatatttacgccaataatgatgtggtggtgcctactggcggctgtgatgtt

SEQ ID NO: 244 - DNA, 489 bp, Escherichia coli
ttcgcctgtaaaaccgccaatggcaccgctatccctattggcggtggcagcgccaatgtttatgtaaaccttgcgcccgccgtgaatgtggggcaaaacctggtcgtagatctttcgacgcaaatcttttgccataacgattacccggaaaccattacagactatgtcacactgcaacgaggttcggcttatggcggcgtgttatctaatttttccgggaccgtaaaatatagtggcagtagctatccatttccgaccaccagtgaaacgccgcgcgttgtttataattcgagaacggataagccgtggccggtggcgctttatttgacgcctgtgagcagtgctggcggggtggcgattaaagctggttcattaattgccgtgcttattttgcgacagaccaacaactataacagcgatgattttcagtttgtgtggaatatttacgccaataatgatgtggtggtgcccactggcggctgcgatgtt

SEQ ID NO: 245 - DNA, 489 bp, Escherichia coli
ttcgcctgtaaaaccgccaatggtaccgcaatccctattggcggtggcagcgccaatgtttatgtaaaccttgcgcctgccgtgaatgtggggcaaaacctggtcgtggatctttcgacgcaaatcttttgccataacgattacccggaaaccattacagactatgtcacactgcaacgaggttcggcttatggcggcgtgttatctagtttttccgggaccgtaaaatataatggcagtagctatcctttccctactaccagcgaaacgccgcgggttgtttataattcgagaacggataagccgtggccggtggtgctttatttgacgccggtgagcagtgcggggggagtggcgattaaagctggctcattaattgccgtgcttattttgcgacagaccaacaactataacagcgatgatttccagtttgtgtggaatatttacgccaataatgatgtggtggtgcccactggcggctgtgatgtt

SEQ ID NO: 246 - DNA, 489 bp, Escherichia coli
ttcgcctgtaaaaccgccaatggtacagctatccctattggcggtggcagcgctaatgtttatgtaaaccttgcgcccgccgtgaatgtggggcaaaacctggtcgtagatctttcgacgcaaatcttttgccataacgattatccggaaaccattacagactatgtcacactgcaacgaggctcggcttatggcggcgtgttatctaatttttccgggaccgtaaaatatagtggcagtagctatccatttcctaccaccagcgaaacgccgcgcgttgtttataattcgagaacggataagccgtggctggtggcgctttatttgacgcctgtgagcagtgcgggcggggtggcgattaaagctggctcattaattgccgtgcttattttgcgacagaccaacaactataacagcgatgatttccagtttgtgtggaatatttacgccaataatgatgtggtggtgcccactggcggctgtgatgtt

SEQ ID NO: 247 - DNA, 489 bp, Escherichia coli
ttcgcctgtaaaaccgccaatggtaccgctatccctattggcggtggcagcgccaatgtttatgtaaatcttgcgcccgccgtgaatgtggggcaaaacctggtcgtagatctttcgacgcaaatcttttgccataacgattatccggaaaccattacagactatgtcacactgcaacgaggctcggcttatggcggcgtgttatctaatttttccgggaccgtaaaatatagtggcagtagctatccatttccgaccaccagcgaaacgccgcgggttgtttataattcgagaacggataagccgtggccggtggcgctttatttgacgcctgtgagcagtgcgggcggggtggcgattaaagctggctcattaattgccgtgcttattttgcgacagaccaacaactataacagcgatgatttccagtttgtgtggaatatttacgccaataatgatgtggtggtgcctactggcggctgcgatgtt

SEQ ID NO: 248 - DNA, 489 bp, Escherichia coli
ttcgcctgtaaaaccgccaatggcaccgctatccctattggcggtggcagcgctaatgtttatgtaaaccttgcgcctgccgtgaatgtggggcaaaacctggtcgtggatctttcgacgcaaatcttttgccataacgattatccggaaaccattacagactatgtcacactgcaacgaggctcggcttatggcggcgtgttatctaatttttccgggaccgtaaaatatagtggcagtagctatccatttccgaccactagcgaaacgccgcgcgttgtttataattcgagaacggataagccgtggccggtggcgctttatttgacgcctgtgagcagtgcgggcggggtggcgattaaagctggctcattaattgccgtgctaattttgcgacagaccaacaactataacagcgatgatttccagtttgtgtggaatatttacgccaataatgatgtggtggtgcctactggcggctgtgatgtt

SEQ ID NO: 249 - DNA, 489 bp, Escherichia coli
ttcgcctgtaaaaccgccaatggtaccgctatccctattggcggtggcagcgccaatgtttatgtaaaccttgcgcctgtcgtgaatgtggggcaaaacctggtcgtggatctttcgacgcaaatcttttgccataacgattacccggaaaccattacagactatgtcacactgcaacgaggttcggcttatggcggcgtgttatctagtttttccgggaccgtaaaatataatggcagtagctatcctttccctactaccagcgaaacgccgcgggttgtttataattcgagaacggataagccgtggccggtggcgctttatttgacgcctgtgagcagtgcggggggagtggcgattaaagcaggctcattaattgccgtgcttattttgcgacagaccaacaactataacagcgatgatttccagtttgtgtggaatatttacgccaataatgatgtggtggtgcccactggcggctgcgatgtt

SEQ ID NO: 250 - DNA, 489 bp, Escherichia coli
ttcgcctgtaaaaccgccaatggtaccgctatccctattggcggtggcagcgccaatgtttatgtaaaccttgcgcctgccgtgaatgtggggcaaaacctggtcgtggatctttcgacgcaaatcttttgccataacgattacccggaaaccattacagactatgtcacactgcaacgaggttcggcttatggcggcgtgttatctagtttttccgggaccgtaaaatataatggcagtagctatcctttccctactaccagcgaaacgccgcgggttgtttataattcgagaacggataagccgtggccggtggtgctttatttgacgcctgtgagcagtgcggggggagtggcgattaaagctggctcattaattgccgtgcttattttgcgacagaccaacaactataacagcgatgatttccagtttgtgtggaatatttacgccaataatgatgtggtggtgcccactggcggctgtgatgtt

SEQ ID NO: 251 - DNA, 489 bp, Escherichia coli
ttcgcctgtaaaaccgccaatggtaccgcaatccctattggcggtggcagcgccaatgtttatgtaaaccttgcgcctgccgtgaatgtggggcaaaacctggtcgtggatctttcgacgcaaatcttttgccataacgattacccggaaaccattacagactatgtcacactgcaacgaggttcggcttatggcggcgtgttatctagtttttccgggaccgtaaaatataatggcagtagctatcctttccctactaccagcgaaacgccgcgggttgtttataattcgagaacggataagccgtggccggtggcgctttatttgacgcctgtgagcagtgcggggggagtggcgattaaagcaggctcattaattgccgtgcttattttgcgacagaccaacaactataacagcgatgatttccagtttgtgtggaatatttacgccaataatgatgtggtggtgcccactggcggctgcgatgtt

SEQ ID NO: 252 - DNA, 489 bp, Escherichia coli
ttcgcctgtaaaaccgccaatggtaccgctatccctattggcggtggcagcgccaatgtttatgtaaaccttgcgcctgccgtgaatgtggggcaaaacctggtcgtggatctttcgacgcaaatcttttgccataacgattacccggaaaccattacagactatgtcacactgcaacgagcttcggcttatggcggcgtgttatctagtttttccgggaccgtaaaatataatggcagtagctatcctttccctactaccagcgaaacgccgcgggttgtttataattcgagaacggataagccgtggccggtggcgctttatttgacgcctgtgagcagtgcggggggagtggcgattaaagctggctcattaattgccgtgcttattttgcgacagaccaacaactataacagcgatgatttccagtttgtgtggaatatttacgccaataatgatgtggtggtgcccactggcggctgtgatgtt

SEQ ID NO: 253 - DNA, 489 bp, Escherichia coli
ttcgcctgtaaaaccgccaatggtaccgctatccctattggcggtggcagcgccaatgtttatgtaaaccttgcgcctgccgtgaatgtggggcaaaacctggtcgtggatctttcgacgcaaatcttttgccataacgattacccggaaaccattacagactatgtcacactgcaacgaggttcggcttatggcgacgtgttatctagtttttccgggaccgtaaaatataatggcagtagctatcctttccctactaccagcgaaacgccgcgggttgtttataattcgagaacggataagccgtggccggtggcgctttatttgacgcctgtgagcagtgcggggggagtggcgattaaagcaggctcattaattgccgtgcttattttgcgacagaccaacaactataacagcgatgatttccagtttgtgtggaatatttacgccaataatgatgtggtggtgcccactggcggctgtgatgtt

SEQ ID NO: 254 - DNA, 489 bp, Escherichia coli
ttcgcctgtaaaaccgccaatggtaccgcaatccctattggcggtggcagcgccaatgtttatgtaaaccttgcgcctgccgtgaatgtggggcaaaacctggtcgtggatctttcgacgcaaatcttttgccataacgattacccggaaaccattacagattatgtcacactgcaacgaggcccggcttatggcggcgtgttatctaatttttccgggaccgtaaaatataatggcagtagctatcctttccctactaccagcgaaacgccgcgggttgtttataattcgagaacggataagccgtggccggtggcgctttatttgacgcctgtgagcagtgcggggggagtggcgattaaagctggctcattaattgccgtgctaattttgcgacagaccaacaactataacagcgatgatttccagtttgtgtggaatatttacgccaataatgatgtggtggtgcctactggcggctgtgatgtt

SEQ ID NO: 255 - DNA, 489 bp, Escherichia coli
ttcgcctgtaaaaccgccaatggtactgctatccctattggcggtggcagcgccaatgtttatgtaaaccttgcgcctgccgtgaatgtggggcaaaacctggtcgtggatctttcgacgcaaatcttttgccataacgattacccggaaaccattacagattatgtcacactgcaacgaggctcggcttatggcggcgtgttatctagtttttccgggaccgtaaaatatagtggcagtagctatccatttcctaccaccagtgaaacgccgcgggttgtttataattcgagaacggataagccgtggccggtggcgctttatttgacgcctgtgagcagtgcggggggagtggcgattaaagcaggctcattaattgccgtgcttattttgcgacagaccaacaactataacagcgatgatttccagtttgtgtggaatatttacgccaataatgatgtggtggtgcccactggcggctgcgatgtt

SEQ ID NO: 256 - DNA, 489 bp, Escherichia coli
ttcgcctgtaaaaccgccaatggtaccgctatccctattggcggtggcagcgccaatgtttatgtaaaccttgcgcatgccgtgaatgtggggcaaaacctggtcgtggatctttcgacgcaaatcttttgccataacgattacccggaaaccattacagactatgtcacactgcaacgaggttcggcttatggcggcgtgttatctagtttttccgggaccgtaaaatataatggcagtagctatcctttccctactaccagcgaaacgccgcgggttgtttataattcgagaacggataagccgtggccggtggcgctttatttgacgcctgtgagcagtgcggggggagtggcgattaaagcaggctcattaattgccgtgcttattttgcgacagaccaacaactataacagcgatgatttccagtttgtgtggaatatttacgccaataatgatgtggtggtgcccactggcggctgcgatgtt

SEQ ID NO: 257 - DNA, 489 bp, Escherichia coli
ttcgcctgtaaaaccgccaatggtaccgctatccctattggcggtggcagcgccaatgtttatgtaaaccttgcgcccgtcgtgaatgtggggcaaaacctggtcgtggatctttcgacgcaaatcttttgccataacgattatccggaaaccattacagactatgtcacactgcaacgaggctcggcttatggcggcgtgttatctaatttttccgggaccgtaaaatatagtggcagtagctatccatttcctaccaccagcgaaacgccgcgcgttgtttataattcgagaacggataagccgtggccggtggcgctttatttgacgcctgtgagcagtgcgggcgtggtggcgattaaagctggctcattaattgccgtgcttattttgcgacagaccaacaactataacagcgatgatttccagtttgtgtggaatatttacgccaataatgatgtggtggtgcctactggcggctgcgatgtt

SEQ ID NO: 258 - DNA, 489 bp, Escherichia coli
ttcgcctgtaaaaccgccaatggtaccgctatccctattggcggtggcagcgccaatgtttatgtaaaccttgcgcccgccgtgaatgtggggcaaaacctggtcgtggatctttcgacgcaaatcttttgccataacgattatccggaaaccattacagactatgtcacactgcaacgaggctcggcttatggcggcgtgttatctaatttttccgggaccgtaaaatatagtggcagtagctatccatttcctaccaccagcgaaacgccgcgcgttgtttataattcgagaacggataagccgtggccggtggcgctttatttaacgcctgtgagcagtgcgggcggggtggcgattaaagctggctcattaattgccgtgcttattttgcgacagaccaacaactataacagcgatgatttccagtttgtgtggaatatttacgccaataatgatgtggtggtgcctactggcggctgcgatgtt

SEQ ID NO: 259 - DNA, 489 bp, Escherichia coli
ttcgcctgtaaaaccgccaatggtacagctatccctattggcggtggcagcgctaatgtttatgtaaaccttgcgcccgccgtgaatgtggggcaaaacctggtcgtagatctttcgacgcaaatcttttgccataacgattatccggaaaccattacagactatgtcacactgcaacgaggctcggcttatggcgacgtgttatctaatttttccgggaccgtaaaatatagtggcagtagctatccatttcctaccaccagcgaaacgccgcgcgttgtttataattcgagaacggataagccgtggccggtggcgctttatttgacgcctgtgagcagtgcgggcggggtggcgattaaagctggctcattaattgccgtgcttattttgcgacagaccaacaactataacagcgatgatttccagtttgtgtggaatatttacgccaataatgatgtggtggtgcccactggcggctgtgatgtt

SEQ ID NO: 260 - DNA, 489 bp, Escherichia coli
ttcgcctgtaaaaccgccaatggtacagctatccctattggcggtggcagcgctaatgtttatgtaaaccttgcgcctgccgtgaatgtggggcaaaacctggtcgtagatctttcgacgcaaatcttttgccataacgattatccggaaaccattacagactatgtcacactgcaacgaggctcggcttatggcgccgtgttatctaatttttccgggaccgtaaaatatagtggcagtagctatccatttccgaccaccagcgaaacgccgcgggttgtttataattcgagaacggataagccgtggccggtggcgctttatttgacgcctgtgagcagtgcgggcggggtggcgattaaagctggctcattaattgccgtgcttattttgcgacagaccaacaactataacagcgatgatttccagtttgtgtggaatatttacgccaataatgatgtggtggtgcctactggcggctgcgatgtt

SEQ ID NO: 261 - DNA, 489 bp, Escherichia coli
ttcgcctgtaaaaccgccaatggtaccgctatccctattggcggtggcagcgctaatgtttatgtaaaccttgcgcctgccgtgaatgtggggcaaaacctggtcgtagatctttcgacgcaaatcttttgccataacgattatccggaaaccattacagactatgtcacattgcaacgaggctcggcttatggcggcgtgttatctaatttttccgggaccgtaaaatatagtggcagtagctatccatttccgaccaccagcgaaacgccgcgggttgtttataattcgagaacggataagccgtggccggtggtgctttatttgacgcctgtgagcagtgcgggcggggtggcgattaaagctggttcattaattgccgtacttattttgcgacagaccaacaactataacagcgatgatttccagtttgtgtggaatatttacgccaataatgatgtggtggtgcctactggcggctgcgatgtt

SEQ ID NO: 262 - DNA, 489 bp, Escherichia coli
ttcgcctgtaaaaccgccaatggcaccgctatccctattggcggtggcagcgccaatgtttatgtaaaccttgcgcccaccgtgaatgtggggcaaaacctggtcgtagatctttcgacgcaaatcttttgccataacgattacccggaaaccattacagactatgtcacactgcaacgaggttcggcttatggcggcgtgttatctaatttttccgggaccgtaaaatatagtggcagtagctatccatttcctaccaccagcgaaacgccgcgcgttgtttataattcgagaacggataagccgtggccggtggcgctatatttgacgcctgtgagcagtgcgggcggggtggcgattaaagctggctcattaattgccgtgcttattttgcgacagaccaacaactataacagcgatgatttccagtttgtgtggaatatttatgccaataatgatgtggtggtgcctactggcggctgcgatgtt

SEQ ID NO: 263 - DNA, 489 bp, Escherichia coli
ttcgcctgtaaaaccgccaatggcaccgctatccctattggcggtggcagcgccaatgtttatgtaaaccttgtgcccgccgtgaatgtggggcaaaacctggtcgtagatctttcgacgcaaatcttttgccataacgattacccggaaaccattacagactatgtcacactgcaacgaggttcggcttatggcggcgtgttatctaatttttccgggaccgtaaaatatagtggcagtagctatccatttccgaccaccagtgaaacaccgcgcgttgtttataattcgagaacggataagccgtggccggtggcgctttatttgacgcctgtgagcagtgcgggcggggtggcgattaaagctggctcattaattgccgtgcttattttgcgacagaccaacaactataacagcgatgatttccagtttgtgtggaatatttacgccaataatgatgtggtggtgcctactggcggctgcgatgtt

SEQ ID NO: 264 - DNA, 489 bp, Escherichia coli
ttcgcctgtaaaaccgccaatggtaccgcaatccctattggcggtggcagcgccaatgtttatgtaaaccttgcgcctgtcgtgaatgtggggcaaaacctggtcgtagatctttcgacgcaaatcttttgccataacgattacccagaaaccattacagactatgtcacactgcaacgaggttcggcttatggcggcgtgttatctagtttttccgggaccgtaaaatataatggcagtagctatcctttccctactaccagcgaaacgccgcgggttgtttataattcgagaacggataagccgtggccggtggtgctttatttgacgccggtgagcagtgcggggggagtggcgattaaagctggctcattaattgccgtgcttattttgcgacagaccaacaactataacagcgatgatttccagtttgtgtggaatatttacgccaataatgatgtggtggtgcccactggcggctgtgatgtt

SEQ ID NO: 265 - DNA, 489 bp, Escherichia coli
ttcgcctgtaaaaccgccaatggtaccgcaatccctattggcggtggcagcgccaatgtttatgtaaaccttgcgcctgccgtgaatgtggggcaaaacctggtcgtagatctttcgacgcaaatcttttgccataacgattacccagaaaccattacagactatgtcacactgcaacgaggttcggcttatggcagcgtgttatctagtttttccgggaccgtaaaatataatggcagtagctatcctttccctactaccagcgaaacgccgcgggttgtttataattcgagaacggataagccgtggccggtggtgctttatttgacgccggtgagcagtgcggggggagtggcgattaaagctggctcattaattgccgtgcttattttgcgacagaccaacaactataacagcgatgatttccagtttgtgtggaatatttacgccaataatgatgtggtggtgcccactggcggctgtgatgtt

SEQ ID NO: 266 - DNA, 489 bp, Escherichia coli
ttcgcctgtaaaaccgccaatggtaccgcaatccctattggcggtggcagcgccaatgtttatgtaaaccttgcgcctgccgtgaatgtggggcaaaacctggtcgtagatctttcgacgcaaatcttttgccataacgattacccagaaaccattacagactatgtcacactgcaacgaggttcggcttatggcggcgtgttatctagtttttccgggaccgtaaaatataatggcagtagctatcctttccctactaccagcgaaacgccgcgggttgtttataattcgagaacggataagccgtggccggtggcgatttatttgacgccggtgagcagtgcggggggagtggcgattaaagctggctcattaattgccgtgcttattttgcgacagaccaacaactataacagcgatgatttccagtttgtgtggaatatttacgccaataatgatgtggtggtgcccactggcggctgtgatgtt

SEQ ID NO: 267 - DNA, 489 bp, Escherichia coli
ttcgcctgtaaaaccgccaatggtaccgtaatccctattggcggtggcagcgccaatgtttatgtaaaccttgcgcctgtcgtgaatgtggggcaaaacctggtcgtagatctttcgacgcaaatcttttgccataacgattacccagaaaccattacagactatgtcacactgcaacgaggttcggcttatggcggcgtgttatctagtttttccgggaccgtaaaatataatggcagtagctatcctttccctactaccagcgaaacgccgcgggttgtttataattcgagaacggataagccgtggccggtggcgctttatttgacgccggtgagcagtgcggggggagtggcgattaaagctggctcattaattgccgtgcttattttgcgacagaccaacaactataacagcgatgatttccagtttgtgtggaatatttacgccaataatgatgtggtggtgcccactggcggctgtgatgtt

SEQ ID NO: 268 - DNA, 489 bp, Escherichia coli
ttcgcctgtaaaaccgccaatggtaccgtaatccctattggcggtggcagcgccaatgtttatgtaaaccttgcgcctgccgtgaatgtggggcaaaacctggtcgtagatctttcgacgcaaatcttttgccataacgattacccagaaaccattacagactatgtcacactgcaacgaggttcggcttatggcagcgtgttatctagtttttccgggaccgtaaaatataatggcagtagctatcctttccctactaccagcgaaacgccgcgggttgtttataattcgagaacggataagccgtggccggtggcgctttatttgacgccggtgagcagtgcggggggagtggcgattaaagctggctcattaattgccgtgcttattttgcgacagaccaacaactataacagcgatgatttccagtttgtgtggaatatttacgccaataatgatgtggtggtgcccactggcggctgtgatgtt

SEQ ID NO: 269 - DNA, 489 bp, Escherichia coli
ttcgcctgtaaaaccgccaatggtaccgcaatccctattggcggtggcagcgccaatgtttatgtaaaccttgcgcctgccgtgaatgtggggcaaaacttggtcgtagatctttcgacgcaaatcttttgccataacgattacccagaaaccattacagactatgtcacactgcaacgaggttcggcttatggcggcgtgttatctagtttttccgggaccgtaaaatataatggcagtagctatcctttccctactaccagcgaaacgccgcgggttgtttataattcgagaacggataagccgtggccggtggcgctttatttgacgccggtgagcagtgcggggggagtggcgattaaagctggctcattaattgccgtgcttattttgcgacagaccaacaactataacagcgatgatttccagtttgtgtggaatatttacgccaataatgatgtggtggtgcccactggcggctgcgatgtt

SEQ ID NO: 270 - DNA, 489 bp, Escherichia coli
ttcgcctgtaaaaccgccaatggtaccgctatccctattggcggtggcagcgccaatgtttatgtaaaccttgcgcctgccgtgaatgtggggcaaaacctggtcgtggatctttcgacgcaaatcttttgccataacgattacccggaaaccattacagactatgtcacactgcaacgaggttcggcttatggcggcgtgttatctagtttttccgggatcgtaaaatataatggcagtagctatcctttccctactaccagcgaaacgccgcgggttgtttataattcgagaacggataagccgtggccggtggtgctttatttgacgcctgtgagcagtgcggggggagtggcgattaaagcaggctcattaattgccgtgcttattttgcgacagaccaacaactataacagggatgatttccagtttgtgtggaatatttacgccaataatgatgtggtggtgcccactggcggctgcgatgtt

SEQ ID NO: 271 - DNA, 489 bp, Escherichia coli
ttcgcctgtaaaaccgccaatggtaccgctatccctattggcggtggcagcgctaatgtttatgtaaaccttgcgcccgccgtgaatgtggggcaaaacctggttgtggatctttcgacgcaaatcttttgccataacgattatccggaaaccattacagactatgtcacactgcaacgaggctcggcttatggcggcgtgttatctaatttttccgggaccgtaaaatatagtggcagtagctatccatttcctaccaccagcgaaacgccgcgcgttgtttataattcgagaacggataagccgtggccggtggcgctttatttgacgcctgtgagcagtgcgggcggggtagcgattaaagctggctcattaattgccgtgcttattttgcgacagaccaacaactataacagcgatgatttccagtttgtgtggaatatttatgccaataatgatgtggtggtgcctactggcggctgcgatgtt

SEQ ID NO: 272 - DNA, 489 bp, Escherichia coli
ttcgcctgtaaaaccgccaatggtaccgctatccctattggcggtggcagcgccaatgtttatgtaaaccttgcgcccaccgtgaatgtggggcaaaacctggtcgtggatctttcgacgcaaatcttttgccataacgattatccggaaaccattacagactatgtcacactgcaacgaggctcggcttatggcggcgtgttatctaatttttccgggaccgtaaaatatagtggcagtagctatccatttcctaccaccagcgaaacgcagcgcgttgtttataattcgagaacggataagccgtggccggtggcgctttatttgacgcctgtgagcagtgcgggcggggtggcgattaaagctggctcattaattgccgtgcttattttgcgacagaccaacaactataacagcgatgatttccagtttgtgtggaatatttactccaataatgatgtggtggtgcctactggcggctgcgatgtt

SEQ ID NO: 273 - DNA, 489 bp, Escherichia coli
ttcgcctgtaaaaccgccaatggtaccgctattcctattggcggtggcagcgctaatgtttatgtaaaccttgcgcctgccgtgaatgtggggcaaaacctggtcgtagatctttcgacgcaaatcttttgccataacgattatccggaaaccattacagactatgtcacactgcaacgaggctcggcttatggcggcgtgttatctaatttttccgggaccgtaaaatatagtggcagtagctatccatttccgaccaccagcgaaacgccgcgggttgtttataattcgagaacggataagccgtggccggtggcgctttatttgacgcctgtgagcagtgcgggtggggtggcgattaaagctggctcattaattgccgtgcttattttgcgacagaccaacaactataacagcgatgatttccagtttgtgtggaatatttacgccaataatgatgtggtggtgcctactggcggctgcgatgtt

SEQ ID NO: 274 - DNA, 489 bp, Escherichia coli
ttcgcctgtaaaaccgccaatggtaccgctatccctattggcggtggcagcgccaatgtttatgtaaaccttgcgcctgccgtgaatgtggggcaaaacctggtcgtggatctttcgacgcaaatcttttgccataacgattacccggaaaccattacagactatgtcacactgcaacgaggttcggcttatggcggcgtgttatctagtttttccgggaccgtaaaatataatggcagtagctatcctttccctactaccagcgaaacgccgcgggttgtttataattcgagaacggataagccgtggccggtggcgctttatttgacgcctgtgagcagtgcggggggagtggcgattaaagcaggctcattaattgccgtgcttattttgcgacagaccaacaactataacagcgatgatttccagtttgtgtggaatatttacgccaataatgatgtggtggtgcccactggcggctgctatgtt

SEQ ID NO: 275 - DNA, 489 bp, Escherichia coli
ttcgcctgtaaaaccgccaatggtacagctatccctattggcggtggcagcgctaatgtttatgtaaaccttgcgcccgccgtgaatgtggggcaaaacctggtcgtagatctttcgacgcaaatcttttgccataacgattatccggaaaccattacagactatgtcacactgcaacgaggctcggcttatggcggcgtgttatctaatttttccgggaccgtaaaatatagtggcagtagctatccatttcctaccaccagcgaaacgccgcgcgttgtttataattcgagaacggataagccgtggccggtggcgctttatttgatgcctgtgagcagtgcgggcggggtggcgattaaagctggctcattaattgccgtgcttattttgcgacagaccaacaactataacagcgatgatttccagtttgtgtggaatatttacgccaataatgatgtggtggtgcccactggcggctgtgatgtt

SEQ ID NO: 276 - DNA, 489 bp, Escherichia coli
ttcgcctgtaaaaccgccaatggtaccgcaatccctattggcggtggcagcgccaatgtttatgtaaaccttgcgcctgccgtgaatgtggggcaaaacctggtcgtagatctttcgacgcaaatcttttgccataacgattacccagaaaccattacagactatgtcacactgcaacgaggttcggcttatggctgcgtgttatctagtttttccgggaccgtaaaatataatggcagtagctatcctttccctactaccagcgaaacgccgcgggttgtttataattcgagaacggataagccgtggccggtggcgctttatttgacgccggtgagcagtgcggggggagtggcgattaaagctggctcattaattgccgtgcttattttgcgacagaccaacaactataacagcgatgatttccagtttgtgtggaatatttacgccaataatgatgtggtggtgcccactggcggctgtgatgct

SEQ ID NO: 277 - DNA, 489 bp, Escherichia coli
ttcgcctgtaaaaccgccaatggtacagctatccctattggcggtggcagcgctaatgtttatgtaaaccttgcgcccgccgtgaatgtggggcaaaacctggtcgtagatctttcgacgcaaatcttttgccataacgattatccggaaatcattacagactatgtcacactgcaacgaggctcggcttatggctgcgtgttatctaatttttccgggaccgtaaaatatagtggcagtagctatccatttcctaccaccagcgaaacgccgcgcgttgtttataattcgagaacggataagccgtggccggtggcgctttatttgacgcctgtgagcagtgcgggcggggtggcgattaaagctggctcattaattgccgtgcttattttgcgacagaccaacaactataacagcgatgatttccagtttgtgtggaatatttacgccaataatgatgtggtggtgcccactggcggctgtgatgtt

SEQ ID NO: 278 - DNA, 489 bp, Escherichia coli
ttcgcctgtaaaaccgccaatggcaccgctatccctattggcggtggcagcgccaatgtttatgtaaaccttgcgcccgccgtgaatgtggggcaaaacctggtcgtagatctttcgacgcaaatcttttgccataacgattacccggaaaccattacagactatgtcacactgcaacgaggttcggcttatggcggcgtgttatctaatttttccgggaccgtaaaatatagtggcagtagctatccatttcctaccaccagcgaaacgccgcgggttgtttataattcgagaacggataagccgtggccggtggcgctttatttgacgcctgtgagcagtgcgggcggggtggcgattaaagctggctcattaattgccgtgctaattttgcgacagaccaacaactataacagcgatgatttccagtttgtgtggaatatttacgccaataatgatgtggtggtgcccactggcggctgcgatgtt

SEQ ID NO: 279 - DNA, 489 bp, Escherichia coli
ttcgcctgtaaaaccgccaatggtacagctatccctattggcggtggcagcgctaatgtttatgtaaaccttgcgcctgccgtgaatgtggggcaaaacctggtcgtagatctttcgacgcaaatcttttgccataacgattatccggaaaccattacagactatgtcacactgcaacgaggctcggcttatggctgcgtgttatctaatttttccgggaccgtaaaatatagtggcagtagctatccatttccggccaccagcgaaacgccgcgcgttgtttataattcgagaacggataagccgtggccggtggcgctttatttgacgcctgtgagcagtgcgggcggggtggcaattaaagctggctcattaattgccgtgcttattttgcgacagaccaacaactataacagcgatgatttccagtttgtgtggaatatttacgccaataatgatgtggtggtgcctactggcggctgtgatgtt

SEQ ID NO: 280 - DNA, 489 bp, Escherichia coli
ttcgcctgtaaaaccgccaatggtaccgcaatccctattggcggtggcagcgccaatgtttatgtaaaccttgcgcctgccgtgaatgtggggcaaaacctggtcgtagatccttcgacgcaaatcttttgccataacgattacccagaaaccattacagactatgtcacactgcaacgaggttcggcttatggcggcgtgttatctagtttttccgggaccgtaaaatataatggcagtagctatcctttccctactaccagcgaaacgccgcgggttgtttataattcgagaacggataagccgtggccggtggcgctttatttgacgccggtgagcagtgcggggggagtggcgattaaagctggctcattaattgccgtgcttattttgcgacagaccaacaactataacagcgatgatttccagtttgtgtggaatatttacgccaataatgatgtggtggtgcccactggcggctgtgatgct

SEQ ID NO: 281 - DNA, 489 bp, Escherichia coli
ttcgcctgtaaaaccgccaatggtacagctatccctattggcggtggcagcgctaatgtttatgtaaaccttgcgcctgccgtgaatgtggggcaaaacctggtcgtagatctttcgacgcaaatcttttgccataacgattatccggaaaccattacagactatgtcacactgcaacgaggctcggcttatggcggcgtgttatctaatttttccgggaccgtaaaatatagtggcagtagctatccatttccgaccaccagcgaaacgccgcgggttgtttataattcgagaacggataagccgtggccggtggtgctttatttgacgcctgtgagcagtgcgggcggggtggcgattaaagctggctcattaattgccgtgcttattttgcgacagaccaacaactataacagcgatgatttccagtttgtgtggaatatttacgccaataatgatgtggtggtgcctactggcggctgcgatgtt

SEQ ID NO: 282 - DNA, 489 bp, Escherichia coli
ttcgcctgtaaaaccgccaatggtaccgcaatccctattggcggtggcagcgccaatgtttatgtaaaccttgcgcctgccgtgaatgtggggcaaaacctggtcgtagatctttcgacgcaaatcttttgccataacgattacccagaaaccattacagactatgtcacactgcaacgaggttcggcttatggcagcgtgttatctagtttttccgggaccgtaaaatataatggcagtagctatcctttccctactaccagcgaaacgccgcgggttgtttataattcgagaacggataagccgtggccggtggcgctttatttgacgccggtgagcagtgcggggggagtggtgattaaagctggctcattaattgccgtgcttattttgcgacagaccaacaactataacagcgatgatttccagtttgtgtggaatatttacgccaataatgatgtggtggtgcccactggcggctgtgatgtt

SEQ ID NO: 283 - DNA, 489 bp, Escherichia coli
ttcgcctgtaaaaccgccaatggtacagctatccctattggcggtggcagcgctaatgtttatgtaaaccttgcgcctgccgtgaatgtggggcaaaacctggtcgtagatctttcgacgaaaatcttttgccataacgattatccggaaaccattacagactatgtcacactgcaacgaggctcggcttatggcggcgtgttatctaatttttccgggaccgtaaaatatagtggcagtagctatccatttccgaccaccagcgaaacgccgcgcgttgtttataattcgagaacggataagccgtggccggtggcgctttatttgacgcctgtgagcagtgcgggcggggtggcaattaaagctggctcattaattgccgtgcttattttgcgacagaccaacaactataacagcgatgatttccagtttgtgtggaatatttacgccaataatgatgtggtggtgcctactggcggctgtgatgtt

SEQ ID NO: 284 - DNA, 489 bp, Escherichia coli
ttcgcctgtaaaaccgccaatggtaccgctatccctattggcggtggcagcgccaatgtttatgtaaaccttgcgcctgccgtgaatgtggggcaaaacctggtcgtagatctttcgacgcaaatcttttgccataacgattatccggaaaccattacagactatgtcacattgcaacgaggctcggcttatggcggcgtgttatctaatttttccgggaccgtaaaatatagtggcagtagctatccatttccgaccaccagcgaaacgccgcgcgttgtttataattcgagaacggataagccgtggccggtggcgctttatttgacgcctgtgagcagtgcgggcggggtggcgattaaagctggctcattaattgccgtgcttattttgcgacagaccaacaactataacagcgatgatttccagtttgtgtggaatatttacgccaataatgatgtggtggtgcctactggcggctgtgatgtt

SEQ ID NO: 285 - DNA, 489 bp, Escherichia coli
ttcgcctgtaaaaccgccaatggtaccgctatccctattggcggtggcagcgccaatgtttatgtaaaccttgcgcctgccgtgaatgtggggcaaaacctggtcgtggatctttcgacgcaaatcttttgccataacgattacccggaaaccattacagactatgtcacactgcaacgaggttcggcttatggctgcgtgttatctagtttttccgggaccgtaaaatataatggcagtagctatcctttccctactaccagcgaaacgccgcgggttgtttataattcgagaacggataagccgtggccggtggcgctttatttgacgcctgtgagcagtgcggggggagtggcgattaaagcaggctcattaattgccgtgcttattttgcgacagaccaacaactataacagcgatgatttccagtttgtgtggaatatttacgccaataatgatgtggtggtgcccactggcggctgcgatgtt

SEQ ID NO: 286 - DNA, 489 bp, Escherichia coli
ttcgcctgtaaaaccgccaatggtaccgctatccctattggcggtggcagcgccaatgtttatgtaaaccttgcgcctgccgtgaatgtggggcaaaacctggtcgtggatctttcgacgcaaatcttttgccataacgattacccggaaaccattacagactatgtcacactgcaacgaggttcggcttatggcggcgtgttatctagtttttccaggaccgtaaaatataatggcagtagctatcctttccctactaccagcgaaacgccgcgggttgtttataattcgagaacggataagccgtggccggtggcgctttatttgacgcctgtgagcagtgcggggggagtggcgattaaagctggctcattaattgccgtgcttattttgcgacagaccaacaactataacagcgatgatttccagtttgtgtggaatatttacgccaataatgatgtggtggtgcccactggcggctgtgatgtt

SEQ ID NO: 287 - DNA, 489 bp, Escherichia coli
ttcgcctgtaaaaccgccaatggtaccgctatccctattggcggtggcagcgccaatgtttatgtaaaccttgcgcccgccgtgaatgtggggcaaaacctggtcgtagatctttcgacgcaaatcttttgccataacgattacccggaaaccattacagactatgtcacactgcaacgaggttcggcttatggcggcgtgttatctaatttttccgggaccgtaaaatatagtggcagtagctatccatttccgaccaccagtgaaacaccgcgcgttgtttataattcgagaacggataagccgtggccggtggcgctttatttgacgcctgtgagcagtgcgggcggggtggcgattaaagctggctcattaattgccgtgcttattttgcgacagaccaacaactataacagcgatgatttccagtttgtgtggaatatttacgccaataatgatgtggtggtgcctactggcggctgcgatgtt

SEQ ID NO: 288 - DNA, 489 bp, Escherichia coli
ttcgcctgtaaaaccgccaatggtactgctatccctattggcggtggcagcgccaatgtttatgtaaaccttgcgcccgccgtgaatgtggggcaaaacctggtcgtagatccttcgacgcaaatcttttgccataacgattatccggaaaccattacagactatgtcacactgcaacgaggctcggcttatggcggcgtgttatctaatttttccgggaccgtaaaatatagtggcagtagctatccatttcctaccaccagcgaaacgccgcgcgttgtttataattcgagaacggataagccgtggccggtggcgctttatttgacgcctgtgagcagtgcgggcggggtggcgattaaagctggctcattaattgccgtgctaattttgcgacagaccaacaactataacagcgatgatttccagtttgtgtggaatatttacgccaataatgatgtggtggtgcctactggcggctgtgatgtt

SEQ ID NO: 289 - DNA, 489 bp, Escherichia coli
ttcgcctgtaaaaccgccaatggtaccgcaatccctattggcggtggcagcgccaatgtttatgtaaaccttgcgcctgccgtgaatgtggggcaaaacctggtcgtggatctttcgacgcaaatcttttgccataacgattacccggaaaccattacagattatgtcacactgcaacgaggctcggcttatggtggcgtgttatctaatttttccgggaccgtaaaatataatggcagtagctatcctttccctactaccagcgaaacgccgcgggttgtttataattcgagaacggataagccgtggccggtggcgctttatttgacgcctgtgagcagtgcggggggagtggtgattaaagctggctcattaattgccgtgcttattttgcgacagaccaacaactataacagcgatgatttccagtttgtgtggaatatttacgccaataatgatgtggtggtgcccactggcggctgcgatgtt

SEQ ID NO: 290 - DNA, 489 bp, Escherichia coli
ttcgcctgtaaaaccgccaatggtaccgctatccctattggcggtggcagcgccaatgtttatgtaaaccttgcgcccgccgtgaatgtggggcaaaacctggtcgtggatctttcgacgcaaatcttttgccataacgattatccggaaaccattacagactatgtcacactgcaacgaggctcggcttatggcagcgtgttatctaatttttccgggaccgtaaaatatagtggcagtagctatccattccctaccaccagcgaaacgcagcgcgttgtttataattcgagaacggataagccgtggccggtggcgctttatttgacgcctgtgagcagtgcgggcggggtggcgattaaagctggctcattaattgccgtgcttattttgcgacagaccaacaactataacagcgatgattttcagtttgtgtggaatatttacgccaataatgatgtggtggtgcctactggcggctgcgatgtt

SEQ ID NO: 291 - DNA, 489 bp, Escherichia coli
ttcgcctgtaaaaccgccaatggtactgctatccctattggcggtggcagcgccaatgtttatgtaaaccttgcgcctgccgtgaatgtggggcaaaacctggtcgtggatctttcgacgcaaatcttttgccataacgattacccggaaaccattacagattatgtcacactgcaacgaggctcggcttatggcggcgtgttatctagtttttccgggatcgtaaaatataatggcagtagctatcctttccctactaccagcgaaacgccgcgggttgtttataattcgagaacggataagccgtggccggtggcgctttatttgacgcctgtgagcagtgcggggggagtggcgattaaagcaggctcattaattgccgtgcttattttgcgacagaccaacaactataacagcgatgatttccagtttgtgtggaatatttacgccaataatgatgtggtggtgcccactggcggctgcgatgtt

SEQ ID NO: 292 - DNA, 489 bp, Escherichia coli
ttcgcctgtaaaaccgccaatggcaccgctatccctattggcggtggcagcgccaatgtttatgtaaaccttgcgcccgccgtgaatgtggggcaaaacctggtcgtggatctttcgacgcaaatcttttgccataacgattacccggaaaccattacagattatgtcacactgcaacgaggctcggcttatggcggcgtgttatctaatttttccgggaccgtaaaatatagtggcagtagctatccatttccgaccaccagtgaaacgccgcgggttgtttataattcgagaacggataagccgtggccggtgacgctttatttgacgcctgtgagcagtgcgggcggggtggcgattaaagctggctcattaattgccgtgcttattttgcgacagaccaacaactataacagcgatgatttccagtttgtgtggaatatttacgccaataatgatgtggtggtgcccactggcggctgcgatgtt

SEQ ID NO: 293 - DNA, 489 bp, Escherichia coli
ttcgcctgtaaaaccgccaatggtaccgcaatccctattggcggtggcagcgccaatgtttatgtaaaccttgcgcctgtcgtgaatgtggggcaaaacctggtcgtggatctttcgacgcaaatcttttgccataacgattacccggaaaccattacagattatgtcacactgcaacgaggctcggcttatggcggcgtgttatctaatttttccgggaccgtaaaatataatggcagtagctatcctttccctactaccagcgaaacgccgcgggttgtttataattcgagaacggataagccgtggccggtggcgctttatttgacgcctgtgagcagtgcggggggagtggcgattaaagctggctcattaattgccgtgcttattttgcgacagaccaacaactataacagcgatgatttccagtttgtgtggaatatttacgccaataatgatgtggtggtgcccactggcggctgcgatgtt

SEQ ID NO: 294 - DNA, 489 bp, Escherichia coli
ttcgcctgtaaaaccgccaatggtactgctatccctattggcggtggcagcgccaatgtttatgtaaaccttgcgcctgccgtgaatgtggggcaaaacctggtcgtggatctttcgacgcaaatcttttgccataacgattatccggaaaccattacagactatgtcacactgcaacgaggctcggcttatggcggcgtgttatctaatttttccgggaccgtaaaatatagtggcagtagctatccatttcctaccaccagcgaaacgccgcgggttgtttataattcgagaacggataagccgtggccggtggcgctttatttgacgcctgtgagcagtgcgggcggggtggcgattaaagctggttcattaattgccgtgcttattttgcgacagaccaacaattataacagcgatgattttcagtttgtgtggaatatttacgccaataatgatgtggtggtgcccactggcggctgcgatgtt

SEQ ID NO: 295 - DNA, 489 bp, Escherichia coli
ttcgcctgtaaaaccgccaatggtacagctatccctattggcggtggcagcgccaatgtttatgtaaaccttgcgcctgccgtgaatgtggggcaaaacctggtcgtagatctttcgacgcaaatcttttgccataacgattatccggaaaccattacagactatgtcacactgcaacgaggctcggcttatggcggcgtgttatctaatttttccgggaccgtaaaatatagtggcagtagctatccatttcctaccaccagtgaaacgccgcgcgttgtttataattcgagaacggataagccgtggccggtggcgctttatttgacgcctgtgagcagtgctggcggggtggcgattaaagctggttcattaattgccgtgcttattttgcgacagaccaacaactataacagcgatgattttcagtttgtgtggaatatttacgccaataatgatgtggtggtgcccactggcggctgcgatgtt

SEQ ID NO: 296 - DNA, 489 bp, Escherichia coli
ttcgcctgtaaaaccgccaatggtaccgctatccctattggcggtggcagcgccaatgtttatgtaaaccttgcgcccgccgtgaatgtggggcaaaacctggtcgtggatctttcgacgcaaatcttttgccataacgattatccggaaaccattacagactatatcacactgcaacgaggctcggcttatggcggcgtgttatctaatttttccgggaccgtaaaatatagtggcagtagctatccatttcctaccaccagcgaaacgccgcgcgttgtttataattcgagaacggataagccgtggccggtggcgctttatttgacgcctgtgagcagtgcgggcggggtggcgattaaagctggctcattaattgccgtgcttattttgcgacagaccaacaactataacagcgatgatttccagtttgtgtggaatatttacgccaataatgatgtggtggtgcctactggcggctgcgatgtt

SEQ ID NO: 297 - DNA, 489 bp, Escherichia coli
ttcgcctgtaaaaccgccaatggtacagctatccctattggcggtggcagcgctaatgtttatgtaaaccttgcgcctgtcgtgaatgtggggcaaaacctggtcgtagatctttcgacgcaaatcttttgccataacgattatccggaaaccattacagactatgtcacactgcaacgaggctcggcttatggcggcgtgttatctaatttttccgggaccgtaaaatatagtggcagtagctatccatttccgaccaccagcgaaacgccgcgcgttgtttataattcgagaacggataagccgtggccggtggcgctttatttgacgcctgtgagcagtgcgggcggggtggcgattaaagctggctcattaattgccgtgcttattttgcgacagaccaacaactataacagcgatgatttccagtttgtgtggaatatttacgccaataatgatgtggtggtgcctactggcggctgtgatgtt

SEQ ID NO: 298 - DNA, 489 bp, Escherichia coli
ttcgcctgtaaaaccgccaatggtaccgctatccctattggcggtggcagcgccaatgtttatgtaaaccttgcgcctgccgtgaatgtggggcaaaacctggtcgtggatctttcgacgcaaatcttttgccataacgattacccggaaaccattacagactatgtcacactgcaacgaggttcggcttatggcggcgtgttatctagtttttccgggaccgtaaaatataatggcagtagctatcctttccctactaccagcgaaacgccgcgggttgtttataattcgagaacggataagccgtggccggtggcgctttatttgacgcctgtgagcagtgcggggggagtggtgattaaagctggctcattaattgccgtgcttattttgcgacagaccaacaactataacagcgatgatttccagtttgtgtggaatatttacgccaataatgatgtggtggtgcccactggcggctgtgatgtt

SEQ ID NO: 299 - DNA, 489 bp, Escherichia coli
ttcgcctgtaaaaccgccaatggtaccgctatccctattggcggtggcagcgctaatgtttatgtaaaccttgcgcctgtcgtgaatgtggggcaaaacctggtcgtagatctttcgacgcaaatcttttgccataacgattatccggaaaccattacagactatgtcacactgcaacgaggctcggcttatggcggcgtgttatctaatttttccgggaccgtaaaatatagtggcagtagctatccatttccgaccaccagcgaaacgccgcgcgttgtttataattcgagaacggataagccgtggccggtggcgctttatttgacgcctgtgagcagtgcgggcggggtggtgattaaagctggctcattaattgccgtgcttattttgcgacagaccaacaactataacagcgatgatttccagtttgtgtggaatatttacgccaataatgatgtggtggtgcctactggcggctgtgatgtt

SEQ ID NO: 300 - DNA, 489 bp, Escherichia coli
ttcgcctgtaaaaccgccaatggtaccgctattcctattggcggtggcagcgctaatgtttatgtaaaccttgcgcctgccgtgaatgtggggcaaaacctggtcgtagatctttcgacgaaaatcttttgccataacgattatccggaaaccattacagactatgtcacactgcaacgaggctcggcttatggcggcgtgttatctaatttttccgggaccgtaaaatatagtggcagtagctatccatttccgactaccagcgaaacgccgcgggttgtttataattcgagaacggataagccgtggccggtggcgctttatttgacgcctgtgagcagtgcgggtggggtggcgattaaagctggctcattaattgccgtgcttattttgcgacagaccaacaactataacagcgatgatttccagtttgtgtggaatatttacgccaataatgatgtggtggtgcctactggcggctgcgatgtt

SEQ ID NO: 301 - DNA, 489 bp, Escherichia coli
ttcgcctgtaaaaccgccaatggtaccgctatccctattggcggtggcagcgctaatgtttatgtaaaccttgcgcctgccgtgaatgtggggcaaaacctggtcgtagatctttcgacgcaaatcttttgccataacgattatccggaaaccattacagactatgtcacactgcaacgaggctcggcttatggcagcgtgttatctaatttttccgggaccgtaaaatatagtggcagtagctatccatttccgaccaccagcgaaacgccgcgggttgtttataattcgagaacggataagccgtggccggtggcgctttatttgacgcctgtgagcagtgcgggcggggtggcgattaaagctggctcattaattgccgtgcttattttgcgacagaccaacaactataacagcgatgatttccagtttgtgtggaatatttacgccaataatgatgtggtggtgcctactggcggctgcgatgtt

SEQ ID NO: 302 - DNA, 489 bp, Escherichia coli
ttcgcctgtaaaaccgccaatggtacagctatccctattggcggtggcagcgctaatgtttatgtaaaccttgcgcctgtcgtgaatgtggggcaaaacctggtcgtagatctttcgacgcaaatcttttgccataacgattatccggaaaccattacagactatgtcacactgcaacgaggctcggcttatggcggcgtgttatctaatttttccgggaccgtaaaatatagtggcagtagctatccatttccgaccaccagcgaaacgccgcgggttgtttataattcgagaacggataagccgtggccggtggcgctttatttgacgcctgtgagcagtgcgggcggggtggcgattaaagctggctcattaattgccgtgcttattttgcgacagaccaacaactataacagcgatgatttccagtttgtgtggaatatttacgccaataatgatgtggtggtgcctactggcggctgcgatgtt

SEQ ID NO: 303 - DNA, 489 bp, Escherichia coli
ttcgcctgtaaaaccgccaatggtactgctatccctattggcggtggcagcgccaatgtttatgtaaaccttgcgcctgtcgtgaatgtggggcaaaacctggtcgtggatctttcgacgcaaatcttttgccataacgattacccggaaaccattacagactatgtcacactgcaacgaggttcggcttatggcggcgtgttatctagtttttccgggaccgtaaaatataatggcagtagctatcctttccctactaccagcgaaacgccgcgggttgtttataattcgagaacggataagccgtggccggtggtgctttatttgacgcctgtgagcagtgctggcggggtggcgattaaagctggttcattaattgccgtgcttattttgcgacagaccaacaactataacagcgatgattttcagtttgtgtggaatatttacgccaataatgatgtggtggtgcccactggcggctgtgatgtt

SEQ ID NO: 304 - DNA, 489 bp, Escherichia coli
ttcgcctgtaaaaccgccaatggtacagctatccctattggcggtggcagcgctaatgtttatgtaaaccttgcgcctgccgtgaatgtggggcaaaacctggtcgtaggtctttcgacgcaaatcttttgccataacgattatccggaaaccattacagactatgtcacactgcaacgaggctcggcttatggcggcgtgttatctaatttttccgggaccgtaaaatatagtggcagtagctatccatttccgaccaccagcgaaacgccgcgcgttgtttataattcgagaacggataagccgtggccggtggcgctttatttgacgcctgtgagcagtgcgggcggggtggcgattaaagctggctcattaattgccgtgcttattttgcgacagaccaacaactataacagcgatgatttccagtttgtgtggaatatttacgccaataatgatgtggtggtgcctactggcggctgtgatgtt

SEQ ID NO: 305 - DNA, 489 bp, Escherichia coli
ttcgcctgtaaaaccgccaatggtaccgcaatccctattggcggtggcagcgccaatgtttatgtaaaccttgcgcctgccgtgaatgtggggcaaaacctggtcgtagatctttcgacgcaaatcttttgccataacgattacccggaaaccattacagactatgtcacactgcaacgaggttcggcttatggcggcgtgttatctaatttttccgggaccgtaaaatataatggcagtagctatccttttcctactaccagcgaaacgccgcgcgttgtttataattcgagaacggataagccgtggccggtggcgctttatttgacgcctgtgagcagtgcggggggggtggcgattaaagctggttcattaattgccgtgcttattttgcgacagaccaacaattataacagcgatgattttcagtttgtgtggaatatttacgccaataatgatgtggtggtgcccactggcggctgcgatgtt

SEQ ID NO: 306 - DNA, 489 bp, Escherichia coli
ttcgcctgtaaaaccgccaatggtaccgctatccctattggcggtggcagcgccaatgtttatgtaaaccttgcgcctaccgtgaatgtggggcaaaacctggtcgtggatctttcgacgcaaatcttttgccataacgattacccggaaaccattacagactatgtcacactgcaacgaggttcggcttatggcggcgtgttatctagtttttccgggatcgtaaaatataatggcagtagctatcctttccctactaccagcgaaacgccgcgggttgtttataattcgagaacggataagccgtggccggtggcgctttatttgacgcctgtgagcagtgcggggggagtggcgattaaagctggctcattaattgccgtgcttattttgcgacagaccaacaactataacagcgatgatttccagtttgtgtggaatatttacgccaataatgatgtggtggtgcccactggcggctgtgatgtt

SEQ ID NO: 307 - DNA, 489 bp, Escherichia coli
ttcgcctgtaaaaccgccaatggtactgctatccctattggcggtggcagcgccaatgtttatgtaaaccttgcgcctgtcgtgaatgtggggcaaaacctggtcgtggatctttcgacgcaaatcttttgccataacgattacccggaaaccattacagactatgtcacactgcaacgaggttcggcttatggcggcgtgttatctagtttttccgggaccgtaaaatataatggcagtagctatcctttccctactaccagcgaaacgccgcgggttgtttataattcgagaacggataagccgtggccggtggcgctttatttgacgccggtgagcagtgcggggggagtggcgattaaagctggctcattaattgccgtgcttattttgcgacagaccaacaactataacagcgatgatttccagtttgtgtggaatatttacgccaataatgatgtggtggtgcccactggcggctgcgatgtt

SEQ ID NO: 308 - DNA, 489 bp, Escherichia coli
ttcgcctgtaaaaccgccaatggcaccgctatccctattggcggtggcagcaccaatgtttatgtaaaccttgcgcccgccgtgaatgtggggcaaaacctggtcgtagatctttcgacgcaaatcttttgccataacgattacccggaaaccattacagactatgtcacactgcaacgaggttcggcttatggcggcgtgttatctaatttttccgggaccgtaaaatatagtggcagtagctatccatttccgaccaccagcgaaacgccgcgcgttgtttataattcgagaacggataagccgtggccggtggcgctttatttgacgcctgtgagcagtgcgggcggggtggcgattaaagctggctcattaattgccgtgctaattttgcgacagaccaacaactataacagcgatgatttccagtttgtgtggaatatttacgccaataatgatgtggtggtgcctactggcggctgcgatgtt

SEQ ID NO: 309 - DNA, 489 bp, Escherichia coli
ttcgcctgtaaaaccgccaatggtaccgcaatccctattggcggtggcagcgccaatgtttatgtaaaccttgcgcctgccgtgaatgtggggcaaaacctggtcgtggatctttcgacgcaaatcttttgccataacgattacccggaaaccattacagactatgccacactgcaacgaggttcggcttatggcggcgtgttatctagtttttccgggaccgtaaaatataatggcagtagctatcctttccctactaccagcgaaacgccgcgggttgtttataattcgagaacggataagccgtggccggtggcgctttatttgacgccggtgagcagtgcggggggagtggcgattaaagctggctcattaattgccgtgcttattttgcgacagaccaacaactataacagcgatgatttccagtttgtgtggaatatttacgccaataatgatgtggtggtgcccactggcggctgtgatgtt

SEQ ID NO: 310 - DNA, 489 bp, Escherichia coli
ttcgcctgtaaaaccgccaatggcaccgctatccctattggcggtggcagcgccaatgtttatgtaaaccttgcgcccgtcgtgaatgtggggcaaaacctggtcgtagatctttcgatgcaaatcttttgccataacgattacccggaaaccattacagactatgtcacactgcaacgaggctcggcttacggcggcgtgttatctaatttttccgggaccgtaaaatatagtggcagtagctatccatttccgaccaccagcgaaacgccgcgcgttgtttataattcgagaacggataagccgtggccggtggcgctttatttgacgcctgtgagcagtgcgggcggggtggcgattaaagctggttcattaattgccgtgcttattttgcgacagaccaacaactataacagcgatgattttcagtttgtgtggaatatttacgccaataatgatgtggtggtgcccactggcggctgcgatgtt

SEQ ID NO: 311 - DNA, 489 bp, Escherichia coli
ttcgcctgtaaaaccgccaatggtaccgcaatccctattggcggtggcagcgccaatgtttatgtaaaccttgcgcctaccgtgaatgtggggcaaaacctggtcgtggatctttcgacgcaaatcttttgccataacgattacccggaaaccattacagactatgtcacactgcaacgaggttcggcttatggcggcgtgttatctagtttttccggggccgtaaaatataatggcagtagctatcctttccctactaccagcgaaacgccgcgggttgtttataattcgagaacggataagccgtggccggtggcgctttatttgacgccggtgagcagtgcggggggagtggcgattaaagctggctcattaattgccgtgcttattttgcgacagaccaacaactataacagcgatgatttccagtttgtgtggaatatttacgccaataatgatgtggtggtgcccactggcggctgtgatgtt

SEQ ID NO: 312 - DNA, 489 bp, Escherichia coli
ttcgcctgtaaaaccgccaatggtaccgctatccctattggcggtggcagcgccaatgtttatgtaaaccttgcgcccgccgtgaatgtggggcaaaacctggtcgtggatctttcgacgcaaatcttttgccataacgattacccagaaaccattacagactatgtcacactgcaacgaggctcggcttatggtggcgtgttatctaatttttccgggaccgtaaaatatagtggcagtagctatccatttccgaccaccagtgaaacgccgcgcgttgtttataattcgagaacggataagccgtggccggtggcgctttatttgacgcctgtgagcagtgcaggcggggtggcgattaaagctggctcattaattgccgtgcttattttgcgacagactaacaactataacagcgatgatttccagtttgtgtggaatatttacgccaataatgatgtggtggtgcctactggcggctgcgatgtt

SEQ ID NO: 313 - DNA, 489 bp, Escherichia coli
ttcgcctgtaaaaccgccaatggcaccgctatccctattggcggtggcagcgccaatgtttatgtaaaccttgcgcccgccgtgaatgtggggcaaaacctggtcgtggatctttcgacgcaaatcttttgccataacgattacccggaaaccattacagattatgtcacactgcaacgaggctcggcttatggcggcgtgttatctaatttttccgggaccgtaaaatatagtggcagtagctatccatttccgaccaccagtgaaacgccgcgggttgtttataattcgagaacggataagctgtggccggtggcgctttatttgacgcctgtgagcagtgcgggcggggtggtgattaaagctggctcattaattgccgtgcttattttgcgacagaccaacaactataacagcgatgatttccagtttgtgtggaatatttacgccaataatgatgtggtggtgcccactggcggctgcgatgtt

SEQ ID NO: 314 - DNA, 489 bp, Escherichia coli
ttcgcctgtaaaaccgccaatggtaccgctatccctattggcggtggcagcgccaatgtttatgtaaaccttgcgcctgccgtgaatgtggggcaaaaactggtcgtggatctttcgacgcaaatcttttgccataacgattacccggaaaccattacagactatgtcacactgcaacgaggttcggcttatggcggcgtgttatctagtttttccgggaccgtaaaatataatggcagtagctatcctttccctactaccagcgaaacgccgcgggttgtttataattcgagaacggataagccgtggccggtggcgctttatttgacgcctgtgagcagtgcggggggagtggcgattaaagctggctcattaattgccgtgcttattttgcgacagaccaacaactataacagcgatgatttccagtttgtgtggaatatttacgccaataatgatgtggtggtgcccactggcggctgtgatgtt

SEQ ID NO: 315 - DNA, 489 bp, Escherichia coli
ttcgcctgtaaaaccgccaatggtaccgcaatccctattggcggtggcagcgccaatgtttatgtaaaccttgcgcctgccgtgaatgtggggcaaaacctggtcgtagatctttcgacgcaaatcttttgccataacgattacccagaaaccattacagactatgtcacactgcaacgaggttcggcttatggcggcgtgttatctagtttttccgggaccgtaaaatataatggcagtagctatcctttccctactaccagcgaaacgccgcgggttgtttataattcgagaacggataagccgtggccggtggtgctttatttgacgccggtgagcagtgcggggggagtggcgattaaagctggctcattaattgccgtgcttattttgcgacagaccaacaactataacagcgatgatttccagtttgtgtggaatatttacgccaataatgatgtggtggtgcccactggcggctgcgatgtt

SEQ ID NO: 316 - DNA, 489 bp, Escherichia coli
ttcgcctgtaaaaccgccaatggcaccgctatccctattggcggtggcagcgccaatgtttatgtaaaccttgcgcccgccgtgaatgtggggcaaaacctggtcgtggatctttcgacgcaaatcttttgccataacgattacccggaaaccattacagattatgtcacactgcaacgaggctcggcttatggcggcgtgttatctaatttttccgggaccgtaaaatatagtggcagtagctatccatttccgaccaccagtgaaacgccgcgggttgtttataattcgagaacggataagccgtggccggtggcgctttatttgacgcctgtgagcagtgcgggcgggggggtgattaaagctggctcattaattgccgtgcttattttgcgacagaccaacaactataacagcgatgatttccagtttgtgtggaatatttacgccaataatgatgtggtggtgcccactggcggctgcgatgtt

SEQ ID NO: 317 - DNA, 489 bp, Escherichia coli
ttcgcctgtaaaaccgccaatggtaccgcaatccctattggcggtggcagcgccaatgtttatgtaaaccttgcgcctgccgtgaatgtggggcaaaacctggtcgtagatctttcgacgcaaatcttttgccataacgattacccagaaaccattacagactatgtcacactgcaacgaggttcggcttatggcagcgtgttatctagtttttccgggaccgtaaaatataatggcagtagctatcctttccctactaccagcgaaacgccgcgggttgtttataattcgagaacggataagccgtggccggtgacgctttatttgacgccggtgagcagtgcggggggagtggcgattaaagctggctcattaattgccgtgcttattttgcgacagaccaacaactataacagcgatgatttccagtttgtgtggaatatttacgccaataatgatgtggtggtgcccactggcggctgtgatgtt

SEQ ID NO: 318 - DNA, 489 bp, Escherichia coli
ttcgcctgtaaaaccgccaatggtacagctatccctattggcggtggcagcgctaatgtttatgtaaaccttgcgcctgccgtgaatgtggggcaaaacctggtcgtggatctttcgacgcaaatcttttgccataacgattatccggaaaccattacagactatgtcacactgcaacgaggctcggcttatggcggcgtgttatctaatttttccgggaccgtaaaatatagtggcagtagctatccatttccgaccaccagcgaaacgccgcgcgttgtttataattcgagaacggataagccgtggccggtggcgctttatttgacgcctgtgagcagtgcgggcggggtggcaattaaagctggctcattaattgccgtgcttattttgcgacagaccaacaactataacagcgatgatttccagtttgtgtggaatatttacgccaataatgatgtggtggtgcctactggcggctgtgatgtt

SEQ ID NO: 319 - DNA, 489 bp, Escherichia coli
ttcgcctgtaaaaccgccaatggtaccgcaatccctattggcggtggcagcgccaatgtttatgtaaaccttgcgcctgtcgtgaatgtggggcaaaacctggtcgtggatctttcgacgcaaatcttttgccataacgattacccggaaaccattacagattatgtcacactgcaacgaggctcggcttatggcggcgtgttatctaatttttccgggaccgtaaaatataatggcagtagctatcctttccctactaccagcgaaacgccgcgggttgtttataattcgagaacggataagccgtggccggtggcgctttatttgacgcctgtgagcagtgcggggggagtggcgattaaagctggctcattaattgccgtgctaattttgcgacagaccaacaactataacagcgatgatttccagtttgtgtggaatatttacgccaataatgatgtggtggtgcctactggcggctgtgatgtt

SEQ ID NO: 320 - DNA, 489 bp, Escherichia coli
ttcgcctgtaaaaccgccaatggcaccgctatccctattggcggtggcagcgccaatgtttatgtaaaccttgcgcccgccgtgaatgtggggcaaaacctggtcgtagatctttcgacgcaaatcttttgccataacgattacccggaaaccattacagactatgtcacactgcaacgaggttcggcttatggcggcgtgttatctaatttttccgggaccgtaaaatatagtggcagtagctatccatttccgaccaccagtgaaacaccgcgcgttgtttataattcgagaacggataagccgtggccggtggcgctttatttgacgcctgtgagcagtgcgggcggggtggcgattaaagctggctcattaattgccgtgcttattttgcgacagaccaacaactataacagcgatgatttccagtttgtgtggaatatttacgccaataatgatgtggtggtgcctactggcggctgcgatgtt

SEQ ID NO: 321 - DNA, 489 bp, Escherichia coli
ttcgcctgtaaaaccgccaatggcaccgctatccctattggcggtggcagcgccaatgtctatgttaaccttgcgcccgtcgtgaatgtggggcaaaacctggtcgtggatctttcgacgcagatcttttgccataacgattacccggaaacgattacagactatgtcacactgcaacgaggctcggcttatggcggcgtgttatctaatttttccggaaccgtaaaatataatggcagtagctatcctttccctaccaccagcgaaacgccgcgcgttgtttataattcgagaacggataagccctggccggtggcgctttatttgacgcctgtgagcagtgcgggcggggtggcgattaaggctggctcattaattgccgtgctcattttgcgccagaccaacaactataacagcgatgatttccagtttgtgtggaatatttacgccaataatgatgtggtggtgcccaccggcggctgtgatgtt

SEQ ID NO: 322 - DNA, 489 bp, Escherichia coli
ttcgcctgtaaaaccgccaatggtacagctatccctattggcggtggcagcgccaatgtttatgtaaaccttgcgcctgccgtgaatgtggggcaaaacctggtcgtagatctttcgacgcaaatcttttgccataacgattatccggaaaccattacagactatgtcacactgcaccgaggctcggcttatggcggcgtgttatctaatttttccgggaccgtaaaatatagtggtagtagctatccatttcctaccaccagtgaaacgccgcgcgttgtttataattcgagaacggataagccgtggccggtggcgctttatttgacgcctgtgagcagtgctggcggggtggcgattaaagctggttcattaattgccgtgcttattttgcgacagaccaacaactataacagcgatgattttcagtttgtgtggaatatttacgccaataatgatgtggtggtgcccactggcggctgcgatgtt

SEQ ID NO: 323 - DNA, 489 bp, Escherichia coli
ttcgcctgtaaaaccgccaatggtaccgctattcctattggcggtggcagcgctaatgtttatgtaaaccttgcgcctgccgtgaatgtggggcaaaacctggtcgtagatctttcgacgcaaatcttttgccataacgattatccggaaaccattacagactatgtcacactgcaacgaggctcggcttatggcggcgtgttatctaatttttccgggaccgtaaaatatagtggcagtagctatccatttccgaccaccagtgaaacgccgcgcgttgtttataattcgagaacggataagccgtggccggtggcgctttatttgacgcctgtgagcagtgcgggcggggtggcgattaaagctggctcattaattgccgtgcttattttgcgacagaccaacaactataacagcgatgatttccagtttgtgtggaatatttacgccaataatgatgtggtggtgcctactggcggctgcgatgtt

SEQ ID NO: 324 - DNA, 489 bp, Escherichia coli
ttcgcctgtaaaaccgccaatggtacagctatccctattggcggtggcagcgctaatgtttatgtaaaccttgcgcctgccgtgaatgtggggcaaaacctggtcgtagatctttcgacgcaaatcttttgccataacgattatccggaaaccattacagactatgtcacactgcaacgaggctcggcttatggctgcgtgttatctaatttttccgggaccgtaaaatatagtggcagtagctatccatttccgaccaccagcgaaacgccgcgcgttgtttataattcgagaacggataagccgtggccggtggcgctttatttgacgcctgtgagcagtgcgggcggggtggcgattaaagctggctcattaattgccgtgcttattttgcgacagaccaacaactataacagcgatgatttccagtttgtgtggaatatttacgccaataatgatgtggtggtgcctactggcggctgtgatgtt

SEQ ID NO: 325 - DNA, 489 bp, Escherichia coli
ttcgcctgtaaaaccgccaatggtaccgctatccctattggcggtggcagcgccaatgtttatgtaaaccttgcgcctgtcgtgaatgtggggcaaaacctggtcgtggatctttcgacgcaaatcttttgccataacgattacccggaaaccattacagactatgtcacactgcaacgaggttcggcttatggcggcgtgttatctagtttttccgggaccgtaaaatataatggcagtagctatcctttccctactaccagcgaaacgccgcgggttgtttataattcgagaacggataagccgtggccggtggcgctttatttgacgcctgtgagcagtgcggggggagtggtgattaaagcaggctcattaattgccgtgcttattttgcgacagaccaacaactataacagcgatgatttccagtttgtgtggaatatttacgccaataatgatgtggtggtgcccactggcggctgcgatgtt

SEQ ID NO: 326 - DNA, 489 bp, Escherichia coli
ttcgcctgtaaaaccgctaatggtaccgctatccctattggcggtggcagcgctaatgtttatgtaaaccttgcgcccgccgtgaatgtggggcaaaacctggttgtggatctttcgacgcaaatcttttgccataacgattatccggaaaccattacagactatgtcacactgcaacgaggctcggcttatggcggcgtgttatctaatttttccgggaccgtaaaatatagtggcagtagctatccatttccgaccaccagcgaaacgccgcgcgttgtttataattcgagaacggataagccgtggccggtggcgctttatttgacgcctgtgagcagtgcgggcggggtggcgattaaagctggctcattaattgccgtgcttattttgcgacagaccaacaactataacagcgatgatttccagtttgtgtggaatatttacgccaataatgatgtggtggtgcctactggcggctgcgatgtt

SEQ ID NO: 327 - DNA, 489 bp, Escherichia coli
ttcgcctgtaaaaccgccaatggtaccgctatccctattggcggtggcagcgccaatgtttatgtaaaccttgcgcctgccgtgaatgtggggcaaaacctggtcgtggatctttcgacgcaaatcttttgccataacgattacccggaaaccattacagactatgtcacactgcaacgaggttcggcttatggcgtcgtgttatctagtttttccgggatcgtaaaatataatggcagtagctatcctttccctactaccagcgaaacgccgcgggttgtttataattcgagaacggataagccgtggccggtggcgctttatttgacgcctgtgagcagtgcggggggagtggcgattaaagcaggctcattaattgccgtgcttattttgcgacagaccaacaactataacagcgatgatttccagtttgtgtggaatatttacgccaataatgatgtggtggtgcccactggcggctgcgatgtt

SEQ ID NO: 328 - DNA, 489 bp, Escherichia coli
ttcgcctgtaaaaccgccaatggtaccgctatccctattggcggtggcagcgccaatgtttatgtaaaccttgcgcctgccgtgaatgtggggcaaaacctggtcgtggatctttcgacgcaaatcttttgccataacgattacccggaaaccattacagactatgtcacactgcaacgaggttcggctgatggcggcgtgttatctagtttttccgggaccgtaaaatataatggcagtagctatcctttccctactaccagcgaaacgccgcgggttgtttataattcgagaacggataagccgtggccggtggcgctttatttgacgcctgtgagcagtgcggggggagtggcgattaaagcaggctcattaattgccgtgcttattttgcgacagaccaacaactataacagggatgatttccagtttgtgtggaatatttacgccaataatgatgtggtggtgcccactggcggctgcgatgtt

SEQ ID NO: 329 - DNA, 489 bp, Escherichia coli
ttcgcctgtaaaaccgccaatggtaccgctatccctattggcggtggcagcgccaatgtttatgtaaaccttgcgcctaccgtgaatgtggggcaaaacctggtcgtggatctttcgacgcaaatcttttgccataacgattacccggaaaccattacagactatgtcacactgcaacgaggttcggcttatggcggcgtgttatctagtttttccgggaccgtaaaatataatggcagtagctatcctttccctactaccagcgaaacgccgcgggttgtttataattcgagaacggataagccgtggccggtggcgctttatttgacgcctgtgagcagtgcggggggagtggcgattaaagctggctcattaattgccgtgcttattttgcgacagaccaacaactataacagcgatgatttccagtttgtgtggaatatttacgccaataatgatgtggtggtgcccactggcggctgtgatgtt

SEQ ID NO: 330 - DNA, 489 bp, Escherichia coli
ttcgcctgtaaaaccgccaatggtaccgctatccctattggcggtggcagcgccaatgtttatgtaaaccttgcgcccgccgtgaatgtggggcaaaacctggtcgtagatctttcgacgcaaatcttttgccataacgattacccggaaaccattacagactatgtcacactgcaacgaggctcggcttatggcggcgtgttatctaatttttccgggatcgtaaaatatagtggcagtagctatccatttcctaccaccagcgaaacgccgcgggttgtttataattcgagaacggataagccgtggccggtggcgctttatttgacgcctttgagcagtgctggcggggtggcgattaaagctggctcattaattgccgtgctaattttgcgacagaccaacaactataacagcgatgatttccagtttgtgtggaatatttacgccaataatgatgtggtggtgcctactggcggctgtgatgtt

SEQ ID NO: 331 - DNA, 489 bp, Escherichia coli
ttcgcctgtaaaaccgccaatggtaccgctatccctattggcggtggcagcgccaatgtttatgtaaaccttgcgcccgccgtgaatgtggggcaaaacctggtcgtggatctttcgacgcaaatcttttgccataacgattacccagaaaccattacagactatgtcacactgcaacgaggctcggcttatggtggcgtgttatctaatttttccgggaccgtaaaatatagtggcagtagctatccatttccgaccaccagtgaaacgccgcgcgttgtttataattcgagaacggataagccgtggccggtggcgctttatttgacgcctgtgagcagtgcgggcggggtggcaattaaagctggctcattaattgccgtgcttattttgcgacagaccaacaactataacagcgatgatttccagtttgtgtggaatatttacgccaataatgatgtggtggtgcctactggcggctgtgatgtt

SEQ ID NO: 332 - DNA, 489 bp, Escherichia coli
ttcgcctgtaaaaccgccaatggtactgctatccctattggcggtggcagcgccaatgtttatgtaaaccttgcgcctgccgtgaatgtggggcaaaacctggtcgtggatctttcgacgcaaatcttttgccataacgattacccggaaaccattacagattatgtcacactgcaacgaggctcggcttatggcggcgtgttatctagtttttccgggaccgtaaaatatagtggcagtagctatccatttcctaccaccagcgaaacgccgcgggttgtttataattcgagaacggataagccgtggccggtggcgctttatttgacgcctgtgagcagtgcgggcggggtggcgattaaagctggttcattaattgccgtgcttattttgcgacagaccaacaattataacagcgatgattttcagtttgtgtggaatatttacgccaataatgatgtggtggtgcccactggcggctgcgatgtt

SEQ ID NO: 333 - DNA, 489 bp, Escherichia coli
ttcgcctgtaaaaccgccaatggtaccgcaatccctattggcggtggcagcgccaatgtttatgtaaaccttgcgcctgccgtgaatgtggggcaaaacctggtcgtggatctttcgacgcaaatcttttgccataacgattacccggaaaccattacagattatgtcacactgcaacgaggcccggcttatggtggcgtgttatctaatttttccgggaccgtaaaatataatggcagtagctatcctttccctactaccagcgaaacgccgcgggttgtttataattcgagaacggataagccgtggccggtggcgctttatttgacgcctgtgagcagtgcggggggagtggcgattaaagctggctcattaattgccgtgcttattttgcgacagaccaacaactataacagcgatgatttccagtttgtgtggaatatttacgccaataatgatgtggtggtgcccactggcggctgcgatgtt

SEQ ID NO: 334 - DNA, 489 bp, Escherichia coli
ttcgcctgtaaaaccgccaatggtaccgcaatccctattggcggtggcagcgccaatgtttatgtaaaccttgcgcctgtcgtgaatgtggggcaaaacctggtcgtggatctttcgacgcaaatcttttgccataacgattacccggaaaccattacagattatgtcacactgcaacgaggctcggcttatggcagcgtgttatctaatttttccgggaccgtaaaatataatggcagtagctatcctttccctactaccagcgaaacgccgcgggttgtttataattcgagaacggataagccgtggccggtggcgctttatttgacgcctgtgagcagtgcggggggagtggcgattaaagctggctcattaattgccgtgctaattttgcgacagaccaacaactataacagcgatgatttccagtttgtgtggaatatttacgccaataatgatgtggtggtgcctactggcggctgtgatgtt

SEQ ID NO: 335 - DNA, 489 bp, Escherichia coli
ttcgcctgtaaaaccgccaatggtacagctatccctattggcggtggcagcgccaatgtttatgtaaaccttgcgcctgccgtgaatgtggggcaaaacctggtcgtagatctttcgacgcaaatcttttgccataacgattatccggaaaccattacagactatgtcacactgcaacgaggctcggcttatggcggcgtgttatctaatttttccgggaccgtaaaatatagtggcagtagctatccatttccgaccaccagtgaaacgccgcgcgttgtttataattcgagaacggataagccgtggccggtggcgctttatttgacgcctgtgagcagtgcgggcggggtggcgattaaagctggttcattaattgccgtgcttattttgcgacagaccaacaactataacagcgatgattttcagtttgtgtggaatatttacgccaataatgatgtggtggtgcccactggcggctgcgatgtt

SEQ ID NO: 336 - DNA, 489 bp, Escherichia coli
ttcgcctgtaaaaccgccaatggtacagctatccctattggcggtggcagcgctaatgtttatgtaaaccttgcgcctgccgtgaatgtggggcaaaacctggtcgtagatctttcgacgcaaatcttttgccataacgattatccggaaaccattacagactatgtcacactgcaacgaggctcggcttatggcggcgtgttatctaatttttccgggaccgtaaaatatagtggcagtagctatccatttccgaccaccagcgaaacgccgcgggttgtttataattcgagaacggataaaccgtggccggtggcgctttatttgacgcctgtgagcagtgcgggcggggtggcgattaaagctggctcattaattgccgtgcttattttgcgacagaccaacaactataacagcgatgatttccagtttgtgtggaatatttacgccaataatgatgtggtggtgcctactggcggctgcgatgtt

SEQ ID NO: 337 - DNA, 489 bp, Escherichia coli
ttcgcctgtaaaaccgccaatggtacagctatccctattggcggtggcagcgctaatgtttatgtaaaccttgcgcctgccgtgaatgtggggcaaaacctggtcgtagatctttcgacgcaaatcttttgccataacgattatccggaaaccattacagactatgtcacactgcaacgaggcgcggcttatggcggcgtgttatctaatttttccgggaccgtaaaatatagtggcagtagctatccatttccgaccaccagcgaaacgccgcgggttgtttataattcgagaacggataagccgtggccggtggcgctttatttgacgcctgtgagcagtgcgggcggggtggcgattaaagctggctcattaattgccgtgcttattttgcgacagaccaacaactataacagcgatgatttccagtttgtgtggaatatttacgccaataatgatgtggtggtgcctactggcggctgcgatgtt

SEQ ID NO: 338 - DNA, 489 bp, Escherichia coli
ttcgcctgtaaaaccgccaatggtaccgctatccctattggcggtggcagcgccaatgtttatgtaaaccttgcgcctgccgtgaatgtggggcaaaacctggtcgtggatctttcgacgcaaatcttttgccataacgattacccggaaaccattacagactatgtcacactgcaacgaggttcggcttatggcgacgtgttatctagtttttccgggaccgtaaaatataatggcagtagctatcctttccctactaccagcgaaacgccgcgggttgtttataattcgagaacggataagccgtggccggtggcgctttatttgacgcctgtgagcagtgcggggggagtggcgattaaagctggctcattaattgccgtgcttattttgcgacagaccaacaactataacagcgatgatttccagtttgtgtggaatatttacgccaataatgatgtggtggtgcccactggcggctgtgatgtt

SEQ ID NO: 339 - DNA, 489 bp, Escherichia coli
ttcgcctgtaaaaccgccaatggtaccgctatccctattggcggtggcagcgctaatgtttatgtaaaccttgcgcctgccgtgaatgtggggcaaaacctgatcgtagatctttcgacgcaaatcttttgccataacgattatccggaaaccattacagactatgtcacactgcaacgaggctcggcttatggcggcgtgttatctaatttttccgggaccgtaaaatatagtggcagtagctatccatttccgaccaccagcgaaacgccgcgggttgtttataattcgagaacggataagccgtggccggtggcgctttatttgacgcctgtgagcagtgcgggcggggtggtgattaaagctggctcattaattgccgtgcttattttgcgacagaccaacaactataacagcgatgatttccagtttgtgtggaatatttacgccaataatgatgtggtggtgcctactggcggctgcgatgtt

SEQ ID NO: 340 - DNA, 489 bp, Escherichia coli
ttcgcctgtaaaaccgccaatggtaccgcaatccctattggcggtggcagcgccaatgtttatgtaaaccttgcgcctgccgtgaatgtggggcaaaacctggtcgtggatctttcgacgcaaatcttttgccataacgattacccggaaaccattacagattatgtcacactgcaacgaggctcggcttatggcggcgtgttatctaatttttccgggaccgtaaaatataatggcagtagctatcctttccctactaccagcgaaacgccgcgggttgtttataattcgagaacggataagccgtggccggtggcgctttatttgacgcctgtgagcagtgcggggggagtggtgattaaagctggctcattaattgccgtgctaattttgcgacagaccaacaactataacagcgatgatttccagtttgtgtggaatatttacgccaataatgatgtggtggtgcctactggcggctgtgatgtt

SEQ ID NO: 341 - DNA, 489 bp, Escherichia coli
ttcgcctgtaaaaccgccaatggtaccgcaatccctattggcggtggcagcgccaatgtttatgtaaaccttgcgcctgccgtgaatgtggggcaaaacctggtcgtggatctttcgacgcaaatcttttgccataacgattacccggaaaccattacagattatgtcacactgcaacgaggctcggcttatggctgcgtgttatctaatttttccgggaccgtaaaatataatggcagtagctatcctttccctactaccagcgaaacgccgcgggttgtttataattcgagaacggataagccgtggccggtggcgctttatttgacgcctgtgagcagtgcggggggagtggcgattaaagctggctcattaattgccgtgctaattttgcgacagaccaacaactataacagcgatgatttccagtttgtgtggaatatttacgccaataatgatgtggtggtgcctactggcggctgtgatgtt

SEQ ID NO: 342 - DNA, 489 bp, Escherichia coli
ttcgcctgtaaaaccgccaatggtacagctatccctattggcggtggcagcgctaatgtttatgtaaaccttgcgcctgccgtgaatgtggggcaaaacctggtcgtagatctttcgacgcaaatcttttgccataacgattatccggaaaccattacagactatgtcacactgcaacgaggctcggcttatggcgacgtgttatctaatttttccgggaccgtaaaatatagtggcagtagctatccatttccgaccaccagcgaaacgccgcgcgttgtttataattcgagaacggataagccgtggccggtggcgctttatttgacgcctgtgagcagtgcgggcggggtggcgattaaagctggctcattaattgccgtgcttattttgcgacagaccaacaactataacagcgatgatttccagtttgtgtggaatatttacgccaataatgatgtggtggtgcctactggcggctgtgatgtt

SEQ ID NO: 343 - DNA, 489 bp, Escherichia coli
ttcgcctgtaaaaccgccaatggtaccgcaatccctattggcggtggcagcgccaatgtttatgtaaaccttgcgcctgccgtgaatgtggggcaaaacctggtcgtggatctttcgacgcaaatcttttgccataacgattacccggaaaccattacagattatgtcacactgcaacgaggctcggcttatggcggcgtgttatctaatttttccgggaccgtaaaatataatggcagtagctatcctttccctactaccagcgaaacgccgcgggttgtttataattcgagaacggataagccgtggccggtggcgctttatttgatgcctgtgagcagtgcggggggagtggcgattaaagctggctcattaattgccgtgctaattttgcgacagaccaacaactataacagcgatgatttccagtttgtgtggaatatttacgccaataatgatgtggtggtgcctactggcggctgtgatgtt

SEQ ID NO: 344 - DNA, 489 bp, Escherichia coli
ttcgcctgtaaaaccgccaatggtaccgctattcctattggcggtggcagcgctaatgtttatgtaaaccttgcgcctgccgtgaatgtggggcaaaacctggtcgtagatctttcgacgcaaatcttttgccataacgattatccggaaaccattacagactatgtcacactgcaacgaggctcggcttatggcggcgtgttatctaatttttccgggaccgtaaaatatagtggcagtagctatccatttccgactaccagcgaaacgccgcgggttgtttataattcgagaacggataagccgtggccggtggcgctttatttgacgcctgtgagcagtgcgggtggggtggcgattaaagctggctcattaattgccgtgcttattttgcgacaggccaacaactataacagcgatgatttccagtttgtgtggaatatttacgccaataatgatgtggtggtgcctactggcggctgcgatgtt

SEQ ID NO: 345 - DNA, 489 bp, Escherichia coli
ttcgcctgtaaaaccgccaatggtaccgctattcctattggcggtggcagcactaatgtttatgtaaaccttgcgcctgccgtgaatgtggggcaaaacctggtcgtagatctttcgacgcaaatcttttgccataacgattatccggaaaccattacagactatgtcacactgcaacgaggctcggcttatggcggcgtgttatctaatttttccgggaccgtaaaatatagtggcagtagctatccatttccgactaccagcgaaacgccgcgggttgtttataattcgagaacggataagccgtggccggtggcgctttatttgacgcctgtgagcagtgcgggtggggtggcgattaaagctggctcattaattgccgtgcttattttgcgacagaccaacaactataacagcgatgatttccagtttgtgtggaatatttacgccaataatgatgtggtggtgcctactggcggctgcgatgtt

SEQ ID NO: 346 - DNA, 489 bp, Escherichia coli
ttcgcctgtaaaaccgccaatggtaccgctattcctattggcggtggcagcgctaatgtttatgtaaaccttgcgcctgccgtgaatgtggggcaaaacctggtcgtagatctttcgacgcaaatcttttgccataacgattatccggaaaccattacagactatgtcacactgcaacgaggctcgacttatggcggcgtgttatctaatttttccgggaccgtaaaatatagtggcagtagctatccatttccgactaccagcgaaacgccgcgggttgtttataattcgagaacggataagccgtggccggtggcgctttatttgacgcctgtgagcagtgcgggtggggtggcgattaaagctggctcattaattgccgtgcttattttgcgacagaccaacaactataacagcgatgatttccagtttgtgtggaatatttacgccaataatgatgtggtggtgcctactggcggctgcgatgtt

SEQ ID NO: 347 - DNA, 489 bp, Escherichia coli
ttcgcctgtaaaaccgccaatggtaccgcaatccctattggcggtggcagcgccaatgtttatgtaaaccttgcgcctgccgtgaatgtggggcaaaacctggtcgtggatctttcgacgcaaatcttttgccataacgattacccggaaaccattacagattatgtcacactgcaacgaggctcggcttatggcgtcgtgttatctaatttttccgggaccgtaaaatataatggcagtagctatcctttccctactaccagcgaaacgccgcgggttgtttataattcgagaacggataagccgtggccggtggcgctttatttgacgcctgtgagcagtgcggggggagtggcgattaaagctggctcattaattgccgtgctaattttgcgacagaccaacaactataacagcgatgatttccagtttgtgtggaatatttacgccaataatgatgtggtggtgcctactggcggctgtgatgtt

SEQ ID NO: 348 - DNA, 489 bp, Escherichia coli
ttcgcctgtaaaaccgccaatggtaccgctatccctattggcggtggcagcgctaatgtttatgtaaaccttgcgcctgccgtgaatgtggggcaaaacctggtcgtagatctttcgacgcaaatcttttgccataacgattatccggaaaccattacagactatgtcacactgcaacgaggctcggcttatggcggcgtgttatctaatttttccgggaccgtaaaatatagtggcagtagctatccatttccgactaccagcgaaacgccgcgggttgtttataattcgagaacggataagccgtggccggtggcgctttatttgacgcctgtgagcagtgcgggtggggtggcgattaaagctggctcattaattgccgtgcttattttgcgacagaccaacaactataacagcgatgatttccagtttgtgtggaatatttacgccaataatgatgtggtggtgcctactggcggctgcgatgtt

SEQ ID NO: 349 - DNA, 489 bp, Escherichia coli
ttcgcctgtaaaaccgccaatggtaccgcaatccctattggcggtggcagcgccaatgtttatgtaaaccttgcgcctgccgtgaatgtggggcaaaacctggtcgtggatctttcgacgcaaatcttttgccataacgattacccggaaaccattacagattatgtcacactgcaacgaggctcggcttatggccgcgtgttatctaatttttccgggaccgtaaaatataatggcagtagctatcctttccctactaccagcgaaacgccgcgggttgtttataattcgagaacggataagccgtggccggtggcgctttatttgacgcctgtgagcagtgcggggggagtggcgattaaagctggctcattaattgccgtgctaattttgcgacagaccaacaactataacagcgatgatttccagtttgtgtggaatatttacgccaataatgatgtggtggtgcctactggcggctgtgatgtt

SEQ ID NO: 350 - DNA, 489 bp, Escherichia coli
ttcgcctgtaaaaccgccaatggtacagctatccctattggcggtggcagcgccaatgtttatgtaaaccttgcgcccgccgtgaatgtggggcaaaacctggtcgtagatctttcgacgcaaatcttttgccataacgattatccggaaaccattacagactatgtcacactgcaacgaggctcggcttatggcggcgtgttatctaatttttccgggaccgtaaaatatagtggcagtagctatccatttcctaccaccagcgaaacgccgcgcgttgtttataattcgagaacggataagccgtggccggtggcgctttatttgacgcctgtgagcagtgcgggcggggtggcgattaaagctggctcattaattgccgtgctaattttgcgacagaccaacaactataacagcgatgatttccagtttgtgtggaatatttacgccaataatgatgtggtggtgcctactggcggctgtgatgtt

SEQ ID NO: 351 - DNA, 489 bp, Escherichia coli
ttcgcctgtaaaaccgccaatggtacagctatccctattggcggtggcagcgctaatgtttatgtaaaccttgcgcccgccgtgaatgtggggcaaaacctggtcgtagatctttcgacgcaaatctttttccataacgattatccggaaaccattacagactatgtcacactgcaacgaggctcggcttatggcggcgtgttatctaatttttccgggaccgtaaaatatagtggcagtagctatccatttcctaccaccagcgaaacgccgcgcgttgtttataattcgagaacggataagccgtggccggtggcgctttatttgacgcctgtgagcagtgcgggcggggtggcgattaaagctggctcattaattgccgtgcttattttgcgacagaccaacaactataacagcgatgatttccagtttgtgtggaatatttacgccaataatgatgtggtggtgcccactggcggctgtgatgtt

SEQ ID NO: 352 - DNA, 489 bp, Escherichia coli
ttcgcctgtaaaaccgccaatggtaccgcaatccctattggcggtggcagcgccaatgtttatgtaaaccttgcgcctgccgtgaatgtggggcaaaacctggtcgtggatctttcgacgcaaatcttttgccataacgattacccggaaaccattacagattatgtcacactgcaacgaggctcggcttatggcggcgtgttatctaatttttccgggaccgtaaaatataatggcagtagctatcctttccctagtaccagcgaaacgccgcgggttgtttataattcgagaacggataagccgtggccggtggtgctttatttgacgcctgtgagcagtgcggggggagtggcgattaaagctggctcattaattgccgtgctaattttgcgacagaccaacaactataacagcgatgatttccagtttgtgtggaatatttacgccaataatgatgtggtggtgcctactggcggctgtgatgtt

SEQ ID NO: 353 - DNA, 489 bp, Escherichia coli
ttcgcctgtaaaaccgccaatggtacagctatccctattggcggtggcagcgctaatgtttatgtaaaccttgcgcctgtcgtgaatgtggggcaaaacctggtcgtagatctttcgacgcaaatcttttgccataacgattatccggaaaccattacagactatgtcacactgcaacgaggctcggcttatggcggcgtgttatctaatttttccgggaccgtaaaatatagtggcagtagctatccatttccgaccaccagcgaaacgccgcgcgttgtttataattcgagaacggataagccgtggccggtggcgctttatttgacgcctgtgagcagtgcgggcggggtggcaattaaagctggctcattaattgccgtgcttattttgcgacagaccaacaactataacagcgatgatttccagtttgtgtggaatatttacgccaataatgatgtggtggtgcctactggcggctgtgatgtt

SEQ ID NO: 354 - DNA, 489 bp, Escherichia coli
ttcgcctgtaaaaccgccaatggtaccgcaatccctattggcggtggcagcgccaatgtttatgtaaaccttgcgcctgccgtgaatgtggggcaaaacctggtcgtggatctttcgacgcaaatcttttgccataacgattacccggaaaccattacagattatgtcacactgcaacgaggcgcggcttatggcggcgtgttatctaatttttccgggaccgtaaaatataatggcagtagctatcctttccctactaccagcgaaacgccgcgggttgtttataattcgagaacggataagccgtggccggtggcgctttatttgacgcctgtgagcagtgcggggggagtggcgattaaagctggctcattaattgccgtgctaattttgcgacagaccaacaactataacagcgatgatttccagtttgtgtggaatatttacgccaataatgatgtggtggtgcctactggcggctgtgatgtt

SEQ ID NO: 355 - DNA, 489 bp, Escherichia coli
ttcgcctgtaaaaccgccaatggtaccgcaatccctattggcggtggcagcgccaatgtttatgtaaaccttgcgcctgccgtgaatgtggggcaaaacctggtcgtggatctttcgacgcaaatcttttgccataacgattacccggaaaccattacagattatgtcacactgcaacgaggctcggcttatggcggcgtgttatctagtttttccgggaccgtaaaatatagtggcagtagctatcctttccctactaccagcgaaacgccgcgggttgtttataattcgagaacggataagccgtggccggtggcgctttatttgacgcctgtgagcagtgcggggggagtggcgattaaagctggctcattaattgccgtgcttattttgcgacagaccaacaactataacagcgatgatttccagtttgtgtggaatatttacgccaataatgatgtggtggtgcccactggcggctgcgatgtt

SEQ ID NO: 356 - DNA, 489 bp, Escherichia coli
ttcgcctgtaaaaccgccaatggcaccgctatccctattggcggtggcagcgccaatgtttatgtaaaccttgcgcccgccgtgaatgtggggcaaaacctggtcgtggatctttcgacgcaaatcttttgccataacgattacccggaaaccattacagattatgtcacactgcaacgaggctcggcttatggcggcgtgttatctaatttttccgggaccgtaaaatatagtggcagtagctatccatttccgaccaccagtgaaacgccgcgggttgtttataattcgagaacggataagccgtggccggtggtgctttatttgacgcctgtgagcagtgcgggcggggtggtgattaaagctggctcattaattgccgtgcttattttgcgacagaccaacaactataacagcgatgatttccagtttgtgtggaatatttacgccaataatgatgtggtggtgcccactggcggctgcgatgtt

SEQ ID NO: 357 - DNA, 489 bp, Escherichia coli
ttcgcctgtaaaaccgccaatggtaccgctatccctattggcggtggcagcgccaatgtttatgtaaaccttgcgcctgccgtgaatgtggggcaaaacctggtcgtggatctttcgacgcaaatcttttgccataacgattacccggaaaccattacagactatgtcacactgcaacgaggttcggcttatggcgtcgtgttatctagtttttccgggaccgtaaaatataatggcagtagctatcctttccctactaccagcgaaacgccgcgggttgtttataattcgagaacggataagccgtggccggtggcgctttatttgacgcctgtgagcagtgcggggggagtggcgattaaagctggctcattaattgccgtgcttattttgcgacagaccaacaactataacagcgatgatttccagtttgtgtggaatatttacgccaataatgatgtggtggtgcccactggcggctgtgatgtt

SEQ ID NO: 358 - DNA, 489 bp, Escherichia coli
ttcgcctgtaaaaccgccaatggtaccgctatccctattggcggtggcagcgctaatgtttatgtagaccttgcgcctgccgtgaatgtggggcaaaacctggtcgtagatctttcgacgcaaatcttttgccataacgattatccggaaaccattacagactatgtcacactgcaacgaggctcggcttatggcggcgtgttatctaatttttccgggaccgtaaaatatagtggcagtagctatccatttccgaccaccagcgaaacgccgcgggttgtttataattcgagaacggataagccgtggccggtggcgctttatttgacgcctgtgagcagtgcgggcggggtggcgattaaagctggctcattaattgccgtgcttattttgcgacagaccaacaactataacagcgatgatttccagtttgtgtggaatatttacgccaataatgatgtggtggtgcctactggcggctgcgatgtt

SEQ ID NO: 359 - DNA, 489 bp, Escherichia coli
ttcgcctgtaaaaccgccaatggtaccgctatccctattggcggtggcagcgccaatgtttatgtaaaccttgcgcctgccgtgaatgtggggcaaaacctggtcgtggatctttcgacgcaaatcttttgccataacgattacccggaaaccattacagactatgtcacactgcaacgaggttcggcttatggcggcgtgttatctagtttttccgggaccgtaaaatataatggcagtagctatcctttctctactaccagcgaaacgccgcgggttgtttataattcgagaacggataagccgtggccggtggcgctttatttgacgcctgtgagcagtgcggggggagtggcgattaaagctggctcattaattgccgtgcttattttgcgacagaccaacaactataacagcgatgatttccagtttgtgtggaatatttacgccaataatgatgtggtggtgcccactggcggctgtgatgtt

SEQ ID NO: 360 - DNA, 489 bp, Escherichia coli
ttcgcctgtaaaaccgccaatggtaccgctatccctattggcggtggcagcgccaatgtttatgtaaaccttgcgcccgtcgtgaatgtggggcaaaacctggtcgtggatctttcgacgcaaatcttttgccataacgattatccggaaaccattacagactatgtcacactgcaacgaggctcggcttatggcggcgtgttatctaatttttccgggaccgtaaaatatagtggcagtagctatccatttcctaccaccagcgaaacgccgcgcgttgtttataattcgagaacggataagccgtggccggtgacgctttatttgacgcctgtgagcagtgcgggcggggtggcgattaaagctggctcattaattgccgtgcttattttgcgacagaccaacaactataacagcgatgatttccagtttgtgtggaatatttacgccaataatgatgtggtggtgcctactggcggctgcgatgtt

SEQ ID NO: 361 - DNA, 489 bp, Escherichia coli
ttcgcctgtaaaaccgccaatggtaccgctatccctattggcggtggcagcgccaatgtttatgtaaaccttgcgcctgccgtgaatgtggggcaaaacctggtcgtgtatctttcgacgcaaatcttttgccataacgattacccggaaaccattacagactatgtcacactgcaacgaggttcggcttatggcggcgtgttatctagtttttccgggaccgtaaaatataatggcagtagctatcctttccctactaccagcgaaacgccgcgggttgtttataattcgagaacggataagccgtggccggtggtgctttatttgacgcctgtgagcagtgcggggggagtggcgattaaagctggctcattaattgccgtgcttattttgcgacagaccaacaactataacagcgatgatttccagtttgtgtggaatatttacgccaataatgatgtggtggtgcccactggcggctgtgatgtt

SEQ ID NO: 362 - DNA, 489 bp, Escherichia coli
ttcgcctgtaaaaccgccaatggtaccgctatccctattggcggtggcagcgccaatgtttatgtaaaccttgcgcccgccgtgaatgtggggcaaaacctggtcgtagatctttcgacgcaaatcttttgccataacgattacccggaaaccattacagactatgtcacactgcaacgaggctcggcttatggcgacgtgttatctaatttttccgggaccgtaaaatatagtggcagtagctatccatttcctaccaccagcgaaacgccgcgggttgtttataattcgagaacggataagccgtggccggtggcgctttatttgacgcctgtgagcagtgctggcggggtggcgattaaagctggctcattaattgccgtgctaattttgcgacagaccaacaactataacagcgatgatttccagtttgtgtggaatatttacgccaataatgatgtggtggtgcctactggcggctgtgatgtt

SEQ ID NO: 363 - DNA, 489 bp, Escherichia coli
ttcgcctgtaaaaccgccaatggtaccgctatccctattggcggtggcagcgccaatgtttatgtaaaccttgcgcctaccgtgaatgtggggcaaaacctggtcgtggatctttcgacgcaaatcttttgccataacgattacccggaaaccattacagactatgtcacactgcaacgaggttcggcttatggcggcgtgttatctagtttttccgggaccgaaaaatataatggcagtagctatcctttccctactaccagcgaaacgccgcgggttgtttataattcgagaacggataagccgtggccggtggcgctttatttgacgcctgtgagcagtgcggggggagtggcgattaaagctggctcattaattgccgtgcttattttgcgacagaccaacaactataacagcgatgatttccagtttgtgtggaatatttacgccaataatgatgtggtggtgcccactggcggctgtgatgtt

SEQ ID NO: 364 - DNA, 489 bp, Escherichia coli
ttcgcctgtaaaaccgccaatggtacagctatccctattggcggtggcagcgctaatgtttatgtaaaccttgcgcccgccgtgaatgtggggcaaaacctggtcgtagatctttcgacgcaaatcttttgccataacgattatccggaaaccattacagactatgtcacactgcaacgaggctcggcttatggcggcgtgttatctaatttttccgggaccgtaaaatatagtggcagtagctatccatttcctaccaccagcgaaacgccgcgcgttgtttataattcgagaacggataagccgtggccggtggcgctttatttgacgcctgtgagcagtgcgggcggggtggtgattaaagctggctcattaattgccgtgcttattttgcgacagaccaacaactataacagcgatgatttccagtttgtgtggaatatttacgccaataatgatgtggtggtgcccactggcggctgtgatgtt

SEQ ID NO: 365 - DNA, 489 bp, Escherichia coli
ttcgcctgtaaaaccgccaatggtaccgctatccctattggcggtggcagcgccaatgtttatgtaaaccttgcgcctgtcgtgaatgtggggcaaaacctggtcgtggatctttcgacgcaaatcttttgccataacgattacccggaaaccattacagactatgtcacactgcaacgaggttcggcttatggcggcgtgttatctagtttttccgggaccgtaaaatataatggcagtagctatcctttccctactaccagcgaaacgccgcgggttgtttataattcgagaacggataagccgtggccggtggcgctttatttgacgcctgtgagcagtgcggggggagtggcgattaaagctggctcattaattgccgtgcttattttgcgacagaccaacaactataacagcgatgatttccagtttgtgtggaatatttacgccaataatgatgtggtggtgcccactggcggctgtgatgtt

SEQ ID NO: 366 - DNA, 489 bp, Escherichia coli
ttcgcctgtaaaaccgccaatggtaccgcaatccctattggcggtggcagcgccaatgtttatgtaaaccttgcgcctaccgtgaatgtggggcaaaacctggtcgtggatctttcgacgcaaatcttttgccataacgattacccggaaaccattacagactatgtcacactgcaacgaggttcggcttatggcggcgtgttatctagtttttccgggaccgtaaaatataatggcagtagctatcctttccctactaccagcgaaacgccgcgggttgtttataattcgagaacggataagccgtggccggtggcgctttatttgacgccggtgagcagtgcggggggagtggcgattaaagctggctcattaattgccgtgcttattttgcgacagaccaacaactataacagcgatgatttccagtttgtgtggaatatttacgccaataatgatgtggtggtgcccactggcggctgtgatgtt

SEQ ID NO: 367 - DNA, 489 bp, Escherichia coli
ttcgcctgtaaaaccgccaatggtaccgctatccctattggcggtggcagcgccaatgtttatgtaaaccttgcgcctgccgtgaatgtggggcaaaacctggtcgtggatctttcgacgcaaatcttttgccataacgattacccggaaaccattacagactatgtcacactgcaacgaggttcggcttatggccgcgtgttatctagtttttccgggaccgtaaaatataatggcagtagctatcctttccctactaccagcgaaacgccgcgggttgtttataattcgagaacggataagccgtggccggtggcgctttatttgacgcctgtgagcagtgcggggggagtggcgattaaagctggctcattaattgccgtgcttattttgcgacagaccaacaactataacagcgatgatttccagtttgtgtggaatatttacgccaataatgatgtggtggtgcccactggcggctgtgatgtt

SEQ ID NO: 368 - DNA, 489 bp, Escherichia coli
ttcgcctgtaaaaccgccaatggtaccgctatccctattggcggtggcagcgccaatgtttatgtaaaccttgcgcctgccgtgaatgtggggcaaaacctggtcgtggatctttcgacgcaaatcttttgccataacgattacccggaaaccattacagactatgtcacactgcaacgaggttcggcttatggcagcgtgttatctagtttttccgggaccgtaaaatataatggcagtagctatcctttccctactaccagcgaaacgccgcgggttgtttataattcgagaacggataagccgtggccggtggtgctttatttgacgcctgtgagcagtgcggggggagtggcgattaaagcaggctcattaattgccgtgcttattttgcgacagaccaacaactataacagggatgatttccagtttgtgtggaatatttacgccaataatgatgtggtggtgcccactggcggctgcgatgtt

SEQ ID NO: 369 - DNA, 489 bp, Escherichia coli
ttcgcctgtaaaaccgccaatggtaccgctatccctattggcggtggcagcgccaatgtttatgtaaaccttgcgcctgccgtgaatgtggggcaaaacctggtcgtggatctttcgacgcaaatcttttgccataacgattacccggaaaccattacagactatgtcacactgcaacgaggttcggcttatggcggcgtgttatctagtttttccgggaccgtaaaatataatggcagtagctatcctttccctactaccagcgaaacgccgcgggttgtttataattcgagaacggataagccgtggccggtggcgctttatttgacgcctgtgagcagtgcggggggagtggcgattaaagctggctcattaattgccgtgcttattttgcgacagaccaacaactataacagcgatgatttccagtttgtgtggaatatttacgccaataatgatgtggtggtgcccactgacggctgtgatgtt

SEQ ID NO: 370 - DNA, 489 bp, Escherichia coli
ttcgcctgtaaaaccgccaatggtactgctatccctattggcggtggcagcgccaatgtttatgtaaaccttgcgcctgccgtgaatgtggggcaaaacctggtcgtggatctttcgacgcaaatcttttgccataacgattacccggaaaccattacagactatgtcacactgcaacgaggtgcggcttatggcggcgtgttatctagtttttccgggaccgtaaaatataatggcagtagctatcctttccctactaccagcgaaacgccgcgggttgtttataattcgagaacggataagccgtggccggtggcgctttatttgacgcctgtgagcagtgctggcggggtggcgattaaagctggttcattaattgccgtgcttattttgcgacagaccaacaactataacagcgatgattttcagtttgtgtggaatatttacgccaataatgatgtggtggtgcccactggcggctgtgatgtt

SEQ ID NO: 371 - DNA, 489 bp, Escherichia coli
ttcgcctgtaaaaccgccaatggtaccgctatccctattggcggtggcagcgccaatgtttatgtaaaccttgcgcctgtcgtgaatgtggggcaaaacctggtcgtggatctttcgacgcaaatcttttgccataacgattacccggaaaccattacagactatgtcacactgcaacgaggttcggcttatggcagcgtgttatctagtttttccgggaccgtaaaatataatggcagtagctatcctttccctactaccagcgaaacgccgcgggttgtttataattcgagaacggataagccgtggccggtggcgctttatttgacgcctgtgagcagtgcggggggagtggcgattaaagcaggctcattaattgccgtgcttattttgcgacagaccaacaactataacagcgatgatttccagtttgtgtggaatatttacgccaataatgatgtggtggtgcccactggcggctgcgatgtt

SEQ ID NO: 372 - DNA, 489 bp, Escherichia coli
ttcgcctgtaaaaccgccaatggtaccgcaatccctattggcggtggcagcgccaatgtttatgtaaaccttgcgcctgccgtgaatgtggggcaaaacctggtcgtagatctttcgacgcaaatcttttgccataacgattacccagaaaccattacagactatgtcacactgcaacgaggttcggcttatggcggcgtgttatctagtttttccgggaccgtaaaatataatggcagtagctatcctttccctactaccagcgaaacgctgcgggttgtttataattcgagaacggataagccgtggccggtggcgctttatttgacgccggtgagcagtgcggggggagtggcgattaaagctggctcattaattgccgtgcttattttgcgacagaccaacaactataacagcgatgatttccagtttgtgtggaatatttacgccaataatgatgtggtggtgcccactggcggctgtgatgtt

SEQ ID NO: 373 - DNA, 489 bp, Escherichia coli
ttcgcctgtaaaaccgccaatggtaccgctatccctattggcggtggcagcgctaatgtttatgtaaaccttgcgcctgccgtgaatgtggggcaaaacctggtcgtagatctttcgacgcaaatcttttgccataacgattatccggaaaccattacagactatgtcacactgcaacgaggctcggcttatggcggcgtgttatctaatttttccgggaccgtaaaatatagtggcagtagctatccatttccgaccaccagcgaaacgccgcgggttgtttataattcgagaacggataagccgtggccggtggcgctttatttgacgcctgtgagcagtgcgggcggggtggcgattaaagctggctcattaattgccgtgcttattttgcgacagaccaacaactataacagcgatgatttccagtttgtgtggaatatttacgccaataatgatgtggtggtgcctactggcggctgtgatgtt

SEQ ID NO: 374 - DNA, 489 bp, Escherichia coli
ttcgcctgtaaaaccgccaatggtaccgcaatccctattggcggtggcagcgccaatgtttatgtaaaccttgcgcctgccgtgaatgtggggcaaaacctgatcgtagatctttcgacgcaaatcttttgccataacgattacccagaaaccattacagactatgtcacactgcaacgaggttcggcttatggcggcgtgttatctagtttttccgggaccgtaaaatataatggcagtagctatcctttccctactaccagcgaaacgccgcgggttgtttataattcgagaacggataagccgtggccggtggcgctttatttgacgccggtgagcagtgcggggggagtggcgattaaagctggctcattaattgccgtgcttattttgcgacagaccaacaactataacagcgatgatttccagtttgtgtggaatatttacgccaataatgatgtggtggtgcccactggcggctgtgatgtt

SEQ ID NO: 375 - DNA, 489 bp, Escherichia coli
ttcgcctgtaaaaccgccaatggtacagctatccctattggcggtggcagcgctaatgtttatgtaaaccttgcgcctgccgtgaatgtggggcaaaacctggtcgtagatctttcgacgcaaatcttgtgccataacgattatccggaaaccattacagactatgtcacactgcaacgaggctcggcttatggcggcgtgttatctaatttttccgggaccgtaaaatatagtggcagtagctatccatttccgaccaccagcgaaacgccgcgggttgtttataattcgagaacggataagccgtggccggtggcgctttatttgacgcctgtgagcagtgcgggcggggtggcgattaaagctggctcattaattgccgtgcttattttgcgacagaccaacaactataacagcgatgatttccagtttgtgtggaatatttacgccaataatgatgtggtggtgcctactggcggctgcgatgtt

SEQ ID NO: 376 - DNA, 489 bp, Escherichia coli
ttcgcctgtaaaaccgccaatggtaccgcaatccctattggcggtggcagcgccaatgtttatgtaaaccttgcgcctgccgtgaatgtggggcaaaacctggtcgtagatctttcgacgcacatcttttgccataacgattacccagaaaccattacagactatgtcacactgcaacgaggttcggcttatggcggcgtgttatctagtttttccgggaccgtaaaatataatggcagtagctatcctttccctactaccagcgaaacgccgcgggttgtttataattcgagaacggataagccgtggccggtggcgctttatttgacgccggtgagcagtgcggggggagtggcgattaaagctggctcattaattgccgtgcttattttgcgacagaccaacaactataacagcgatgatttccagtttgtgtggaatatttacgccaataatgatgtggtggtgcccactggcggctgtgatgct

SEQ ID NO: 377 - skipped

SEQ ID NO: 378 - DNA, 489 bp, Escherichia coli
ttcgcctgtaaaaccgccaatggtaccgctatccctattggcggtggcagcgccaatgtttatgtaaaccttgcgcccgccgtgaatgtggggcaaaacctggtcgtagagctttcgacgcaaatcttttgccataacgattacccggaaaccattacagactatgtcacactgcaacgaggctcggcttatggcggcgtgttatctaatttttccgggaccgtaaaatatagtggcagtagctatccatttcctaccaccagcgaaacgccgcgggttgtttataattcgagaacggataagccgtggccggtggcgctttatttgacgcctgtgagcagtgctggcggggtggcgattaaagctggctcattaattgccgtgctaattttgcgacagaccaacaactataacagcgatgatttccagtttgtgtggaatatttacgccaataatgatgtggtggtgcctactggcggctgtgatgtt

SEQ ID NO: 379 - DNA, 489 bp, Escherichia coli
ttcgcctgtaaaaccgccaatggtaccgcaatccctattggcggtggcagcgccaatgtttatgtaaaccttgcgcctgtcgtgaatgtggggcaaaacctggtcgtagatctttcgacgcaaatcttttgccataacgattacccagaaaccattacagactatgtcacactgcaacgaggttcggcttatggcggcgtgttatctagtttttccgggatcgtaaaatataatggcagtagctatcctttccctactaccagcgaaacgccgcgggttgtttataattcgagaacggataagccgtggccggtggcgctttatttgacgccggtgagcagtgcggggggagtggcgattaaagctggctcattaattgccgtgcttattttgcgacagaccaacaactataacagcgatgatttccagtttgtgtggaatatttacgccaataatgatgtggtggtgcccactggcggctgtgatgtt

SEQ ID NO: 380 - DNA, 489 bp, Escherichia coli
ttcgcctgtaaaaccgccaatggtacagctatccctattggcggtggcagcgctaatgtttatgtaaaccttgcgcctgccgtgaatgtggggcaaaacctgttcgtagatctttcgacgcaaatcttttgccataacgattatccggaaaccattacagactatgtcacactgcaacgaggctcggcttatggcggcgtgttatctaatttttccgggaccgtaaaatatagtggcagtagctatccatttccgaccaccagcgaaacgccgcgcgttgtttataattcgagaacggataagccgtggccggtggcgctttatttgacgcctgtgagcagtgcgggcggggtggcaattaaagctggctcattaattgccgtgcttattttgcgacagaccaacaactataacagcgatgatttccagtttgtgtggaatatttacgccaataatgatgtggtggtgcctactggcggctgtgatgtt

SEQ ID NO: 381 - DNA, 489 bp, Escherichia coli
ttcgcctgtaaaaccgccaatggtaccgcaatccctattggcggtggcagcgccaatgtttatgtaaaccttgcgcctgccgtgaatgtggggcaaaacctggtcgtagatctttcgacgcaaatcttttgccataacgattacccagaaaccattacagactatgtcacactgcaacgaggttcggcttatggcggcgtgttatctagtttttccgggatcgtaaaatataatggcagtagctatcctttccctactaccagcgaaacgccgcgggttgtttataattcgagaacggataagccgtggctggtggcgctttatttgacgccggtgagcagtgcggggggagtggcgattaaagctggctcattaattgccgtgcttattttgcgacagaccaacaactataacagcgatgatttccagtttgtgtggaatatttacgccaataatgatgtggtggtgcccactggcggctgtgatgtt

SEQ ID NO: 382 - DNA, 489 bp, Escherichia coli
ttcgcctgtaaaaccgccaatggtacagctatccctattggcggtggcagcgctaatgtttatgtaaaccttgcgcctgccgtgaatgtggggcaaaacctggtcgtagatctttcgacgcaaatcttttgccataacgattatccggaaaccattacagactatgtcacactgcaacgaggctcggcttatggctgcgtgttatctaatttttccgggaccgtaaaatatagtggcagtagctatccatttccgaccaccagcgaaacgccgcgggttgtttataattcgagaacggataagccgtggccggtggcgctttatttgacgcctgtgagcagtgcgggcggggtggcgattaaagctggctcattaattgccgtgcttattttgcgacagaccaacaactataacagcgatgatttccagtttgtgtggaatatttacgccaataatgatgtggtggtgcctactggcggctgcgatgtt

SEQ ID NO: 383 - DNA, 489 bp, Escherichia coli
ttcgcctgtaaaaccgccaatggtactgctatccctattggcggtggcagcgccaatgtttatgtaaaccttgcgcctgccgtgaatgtggggcaaaacctggtcgtggatctttcgacgcaaatcttttgccataacgattacccggaaaccattacagattatgtcacactgcaacgaggctcggcttatggcggcgtgttatctagtttttccggggccgtaaaatataatggcagtagctatcctttccctactaccagcgaaacgccgcgggttgtttataattcgagaacggataagccgtggccggtggcgctttatttgacgcctgtgagcagtgcggggggagtggcgattaaagcaggctcattaattgccgtgcttattttgcgacagaccaacaactataacagcgatgatttccagtttgtgtggaatatttacgccaataatgatgtggtggtgcccactggcggctgcgatgtt

SEQ ID NO: 384 - DNA, 489 bp, Escherichia coli
ttcgcctgtaaaaccgccaatggtacagctatccctattggcggtggcagcgctaatgtttatgtaaaccttgcgcctgccgtgaatgtggggcaaaacctggtcgtagatctttcggcgcaaatcttttgccataacgattatccggaaaccattacagactatgtcacactgcaacgaggctcggcttatggcggcgtgttatctaatttttccgggaccgtaaaatatagtggcagtagctatccatttccgaccaccagcgaaacgccgcgcgttgtttataattcgagaacggataagccgtggccggtggcgctttatttgacgcctgtgagcagtgcgggcggggtggcaattaaagctggctcattaattgccgtgcttattttgcgacagaccaacaactataacagcgatgatttccagtttgtgtggaatatttacgccaataatgatgtggtggtgcctactggcggctgtgatgtt

SEQ ID NO: 385 - DNA, 489 bp, Escherichia coli
ttcgcctgtaaaaccgccaatggcaccgctatccctattggcggtggcagcgccaatgtttatgtaaaccttgcgcccgccgtgaatgtggggcaaaacctggtcgtggatctttcgaagcaaatcttttgccataacgattacccggaaaccattacagattatgtcacactgcaacgaggctcggcttatggcggcgtgttatctaatttttccgggaccgtaaaatatagtggcagtagctatccatttccgaccaccagtgaaacgccgcgggttgtttataattcgagaacggataagccgtggccggtggcgctttatttgacgcctgtgagcagtgcgggcggggtggtgattaaagctggctcattaattgccgtgcttattttgcgacagaccaacaactataacagcgatgatttccagtttgtgtggaatatttacgccaataatgatgtggtggtgcccactggcggctgcgatgtt

SEQ ID NO: 386 - DNA, 489 bp, Escherichia coli
ttcgcctgtaaaaccgccaatggtaccgctattcctattggcggtggcagcgctaatgtttatgtaaaccttgcgcctgccgtgaatgtggggcaaaacctggtcgtagatctttcgacgcaaatcttttgccataacgattatccggaaaccattacagactatgtcacactgcaacgaggctcggcttatggcggcgtgttatctaatttttccgggaccgtaaaatatagtggcagtagctatccatttccgaccaccagcgaaacgccgcgggttgtttataattcgagaacggataagccgtggccggtggcgctttatttgacgcctgtgagcagtgcgggcggggtggcgattaaagctggttcattaattgccgtgcttattttgcgacagaccaacaactataacagcgatgatttccagtttgtgtggaatatttacgccaataatgatgtggtggtgcctactggcggctgcgatgtt

SEQ ID NO: 387 - DNA, 489 bp, Escherichia coli
ttcgcctgtaaaaccgccaatggtaccgcaatccctattggcggtggcagcgccaatgtttatgtaaaccttgcgcctgccgtgaatgtggggcaaaacctggtcgtagatctttcgacgcaaatcttttgccataacgattacccagaaaccattacagactatgtcacactgcaacgaggttcggcttatggcggcgtgttatctagtttttccgggatcgtaaaatataatggcagtagctatcctttccctactaccagcgaaacgccgcgggttgtttataattcgagaacggataagccgtggccggtggcgctttatttgacgccggtgagcagtgcggggggagtggcgattaaagctggctcattaattgccgtgcttattttgcgacagaccaacaactataacagcgatgatttccagtttgtgtggaatatttacgccaataatgatgtggtggtgcccactggcggctgtgatgct

SEQ ID NO: 388 - DNA, 489 bp, Escherichia coli
ttcgcctgtaaaaccgccaatggtaccgctatccctattggcggtggcagcgccaatgtttatgtaaaccttgcgcctgccgtgaatgtggggcaaaacctggtcgtggatctttcgacgcaaatcttttgccataacgattacccggaaaccattacagactatgtcacactgcaacgaggttcggcttatggcggcgtgttatctagtttttccgggaccgtaaaatataatggcagtagctatcctttctctactaccagcgaaacgccgcgggttgtttataattcgagaacggataagccgtggccggtggcgctttatttgacgcctgtgagcagtgcggggggagtggcgattaaagcaggctcattaattgccgtgcttattttgcgacagaccaacaactataacagcgatgatttccagtttgtgtggaatatttacgccaataatgatgtggtggtgcccactggcggctgcgatgtt

SEQ ID NO: 389 - DNA, 489 bp, Escherichia coli
ttcgcctgtaaaaccgccaatggtacagctatccctattggcggtggcagcgctaatgtttatgtaaaccttgcgcctgccgtgaatgtggggcaaaacctggtcgtagatctttcgacgcaaatcttttgccataacgattatccggaaaccattacagactatgtcacactgcaacgaggctcggcttatggcagcgtgttatctaatttttccgggaccgtaaaatatagtggcagtagctatccatttccgaccaccagcgaaacgccgcgcgttgtttataattcgagaacggataagccgtggccggtggcgctttatttgacgcctgtgagcagtgcgggcggggtggcaattaaagctggctcattaattgccgtgcttattttgcgacagaccaacaactataacagcgatgatttccagtttgtgtggaatatttacgccaataatgatgtggtggtgcctactggcggctgtgatgtt

SEQ ID NO: 390 - DNA, 489 bp, Escherichia coli
ttcgcctgtaaaaccgccaatggtaccgcaatccctattggcggtggcagcgccaatgtttatgtaaaccttgcgcctgccgtgaatgtggggcaaaacctggtcgtggatctttcgacgcaaatcttttgccataacgattacccggaaaccattacagattatgtcacactgcaacgaggctcggcttatggcagcgtgttatctaatttttccgggatcgtaaaatataatggcagtagctatcctttccctactaccagcgaaacgccgcgggttgtttataattcgagaacggataagccgtggccggtggcgctttatttgacgcctgtgagcagtgcggggggagtggcgattaaagctggctcattaattgccgtgctaattttgcgacagaccaacaactataacagcgatgatttccagtttgtgtggaatatttacgccaataatgatgtggtggtgcctactggcggctgtgatgtt

SEQ ID NO: 391 - DNA, 489 bp, Escherichia coli
ttcgcctgtaaaaccgccaatggtaccgcaatccctattggcggtggcagcgccaatgtttatgtaaaccttgcgcttgccgtgaatgtggggcaaaacctggtcgtggatctttcgacgcaaatcttttgccataacgattacccggaaaccattacagattatgtcacactgcaacgaggctcggcttatggcggcgtgttatctaatttttccgggaccgtaaaatataatggcagtagctatcctttccctactaccagcgaaacgccgcgggttgtttataattcgagaacggataagccgtggccggtggcgctttatttgacgcctgtgagcagtgcggggggagtggcgattaaagctggctcattaattgccgtgctaattttgcgacagaccaacaactataacagcgatgatttccagtttgtgtggaatatttacgccaataatgatgtggtggtgcctactggcggctgtgatgtt

SEQ ID NO: 392 - DNA, 489 bp, Escherichia coli
ttcgcctgtaaaaccgccaatggtaccgcaatccctattggcggtggcagcgccaatgtttatgtaaaccttgcgcctgccgtgaatgtggggcaaaacctggtcgtggatctttcgacgcaaatcttttgccataacgattacccggaaaccattacagattatgtcacactgcaacgaagctcggcttatggcggcgtgttatctaatttttccgggaccgtaaaatataatggcagtagctatcctttccctactaccagcgaaacgccgcgggttgtttataattcgagaacggataagccgtggccggtggcgctttatttgacgcctgtgagcagtgcggggggagtggcgattaaagctggctcattaattgccgtgctaattttgcgacagaccaacaactataacagcgatgatttccagtttgtgtggaatatttacgccaataatgatgtggtggtgcctactggcggctgtgatgtt

SEQ ID NO: 393 - DNA, 489 bp, Escherichia coli
ttcgcctgtaaaaccgccaatggtaccgcaatccctattggcggtggcagcgccaatgtttatgtaaaccttgcgcctgccgtgaatgtggggcaaaacctggtcgtggatctttcgacgcaaatcttttgccataacgattacccggaaaccattacagattatgtcacactgcaacgaggctcggcttatggcgccgtgttatctaatttttccgggaccgtaaaatataatggcagtagctatcctttccctactaccagcgaaacgccgcgggttgtttataattcgagaacggataagccgtggccggtggcgctttatttgacgcctgtgagcagtgcggggggagtggcgattaaagctggctcattaattgccgtgctaattttgcgacagaccaacaactataacagcgatgatttccagtttgtgtggaatatttacgccaataatgatgtggtggtgcctactggcggctgtgatgtt

SEQ ID NO: 394 - DNA, 489 bp, Escherichia coli
ttcgcctgtaaaaccgccaatggtaccgcaatccctattggcggtggcagcgccaatgtttatgtaaaccttgcgcctgccgtgaatgtggggcaaaacctggtcgtggatctttcgacgctaatcttttgccataacgattacccggaaaccattacagattatgtcacactgcaacgaggctcggcttatggcggcgtgttatctaatttttccgggaccgtaaaatataatggcagtagctatcctttccctactaccagcgaaacgccgcgggttgtttataattcgagaacggataagccgtggccggtggcgctttatttgacgcctgtgagcagtgcggggggagtggcgattaaagctggctcattaattgccgtgctaattttgcgacagaccaacaactataacagcgatgatttccagtttgtgtggaatatttacgccaataatgatgtggtggtgcctactggcggctgtgatgtt

SEQ ID NO: 395 - DNA, 489 bp, Escherichia coli
ttcgcctgtaaaaccgccaatggtaccgcaatccctattggcggtggcagcgccaatgtttatgtaaaccttgcgcctgccgtgaatgtggggcaaaacctggtcgtggatctttcgacgcaaatcttttgccataacgattacccggaagccattacagattatgtcacactgcaacgaggctcggcttatggctgcgtgttatctaatttttccgggaccgtaaaatataatggcagtagctatcctttccctactaccagcgaaacgccgcgggttgtttataattcgagaacggataagccgtggccggtggtgctttatttgacgcctgtgagcagtgcggggggagtggcgattaaagctggctcattaattgccgtgctaattttgcgacagaccaacaactataacagcgatgatttccagtttgtgtggaatatttacgccaataatgatgtggtggtgcctactggcggctgtgatgtt

SEQ ID NO: 396 - DNA, 489 bp, Escherichia coli
ttcgcctgtaaaaccgccaatggtacagctatccctattggcggtggcagcgctaatgtttatgtaaaccttgcgcctgccgtgaatgtggggcaaaacctggtcgtagatctttcgacgcaaatcttttgccataacgattatccggaaaccattacagactatgtcacactgcaacgaggctcggcttatggcggcgtgttatctaatttttccgggatcgtaaaatatagtggcagtagctatccatttccgaccaccagcgaaacgccgcgcgttgtttataattcgagaacggataagccgtggccggtggcgctttatttgacgcctgtgagcagtgcgggcggggtggcaattaaagctggctcattaattgccgtgcttattttgcgacagaccaacaactataacagcgatgatttccagtttgtgtggaatatttacgccaataatgatgtggtggtgcctactggcggctgtgatgtt

SEQ ID NO: 397 - DNA, 489 bp, Escherichia coli
ttcgcctgtaaaaccgccaatggtaccgctattcctattggcggtggcagcgctaatgtttatgtaaaccttgcgcctgccgtgaatgtggggcaaaacctggtcgtagatctttcgaggcaaatcttttgccataacgattatccggaaaccattacagactatgtcacactgcaacgaggctcggcttatggcggcgtgttatctaatttttccgggaccgtaaaatatagtagcagtagctatccatttccgactaccagcgaaacgccgcgggttgtttataatttgagaacggataagccgtggccggtggcgctttatttgacgcctgtgagcagtgcgggtggggtggcgattaaagctggctcattaattgccgtgcttattttgcgacagaccaacaactataacagcgatgatttccagtttgtgtggaatatttacgccaataatgatgtggtggtgcctactggcggctgcgatgtt

SEQ ID NO: 398 - DNA, 489 bp, Escherichia coli
ttcgcctgtaaaaccgccaatggcaccgctatccctattggcggtggcagcgccaatgtttatgtaaaccttgcgcccgccgtgaatgtggggcaaaacctggtcgtagatctttcgacgcacatcttttgccataacgattacccggaaaccattacagactatgtcacactgcaacgaggctcggcttacggcggcgtgttatctaatttttccgggaccgtaaaatatagtggcagtagctatccatttccgaccaccagcgaaacgccgcgcgttgtttataattcgagaacggataagccgtggccggtggcgctttatttgacgcctgtgagcagtgcgggcggggtggcgattaaagctggttcattaattgccgtgcttattttgcgacagaccaacaactataacagcgatgattttcagtttgtgtggaatatttacgccaataatgatgtggtggtgcccactggcggctgcgatgtt

SEQ ID NO: 399 - DNA, 489 bp, Escherichia coli
ttcgcctgtaaaaccgccaatggtactgctatccctattggcggtggcagcgccaatgtttatgtaaaccttgcgcctgccgtgaatgtggggcaaaacctggtcgtggatctttcgacgcaaatcttttgccataacgattacccggaaaccattacagactatgtcacactgcaacgaggttcggcttatggcggcgtgttatctagtttttccgggaccgtaaaatataatggcagtagctatcctttccctactaccagcgaaacgccgcgggttgtttataattcgagaacggataagccgtggccggtggcgctttatttgacgcctgtgagcagtgctggcggggtggcgattaaagctggttcattaattgccgtgcttattttgcgacagactaacaactataacagcgatgattttcagtttgtgtggaatatttacgccaataatgatgtggtggtgcccactggcggctgtgatgtt

SEQ ID NO: 400 - DNA, 489 bp, Escherichia coli
ttcgcctgtaaaaccgccaatggtaccgctatccctattggcggtggcagcgccaatgtttatgtaaaccttgcgcctgccgtgaatgtggggcaaaacctggtcgtggatctttcgacgcaaatcttttgccataacgattacccggaaaccattacagactatgtcacactgcaacgaggctcggcttatggcggcgtgttatctaatttttccgggaccgtaaaatataatggcagtagctatcctttccctactaccagcgaaacgccgcgggttgtttataattcgagaacggataagccgtggccggtggcgctttatttgacgcctgtgagcagtgcggggggagtggcgattaaagctggctcattaattgccgtgcttattttgcgacagaccaacaactataacagcgatgatttccagtttgtgtggaatatttacgccaataatgatgtggtggtgcccactggcggctgcgatgtt

SEQ ID NO: 401 - DNA, 489 bp, Escherichia coli
ttcgcctgtaaaaccgccaatggtaccgctatccctattggcggtggcagcgccaatgtttatgtaaaccttgcgcctgccgtgaatgtggggcaaaacctggtcgtggatctttcgacgaaaatcttttgccataacgattacccggaaaccattacagactatgtcacactgcaacgaggttcggcttatggcggcgtgttatctagtttttccgggaccgtaaaatataatggcagtagctatcctttccctactaccagcgaaacgccgcgggttgtttataattcgagaacggataagccgtggccggtggcgctttatttgacgcctgtgagcagtgcggggggagtggcgattaaagctggctcattaattgccgtgcttattttgcgacagaccaacaactataacagcgatgatttccagtttgtgtggaatatttacgccaataatgatgtggtggtgcccactggcggctgtgatgtt

SEQ ID NO: 402 - DNA, 489 bp, Escherichia coli
ttcgcctgtaaaaccgccaatggtaccgctatccctattggcggtggcagcgccaatgtttatgtaaaccttgcgcctgccgtgaatgtggggcaaaacctggtcgtggatctttcgacgcaaatcttttgccataacgattacccggaaaccattacagactatgtcacactgcaacgaggttcggcttatggcggcgtgttatctagtttttccgggaccgtaaaatataatggcagtagctatcctttccctactaccagcgaaacgccgcgggttgtttataattcgagaacggataagccgtggccggtggcgctttatttgacgcctgtgagcagtgcggggggagtggcgattaaagcaggctcattaattgccgtgcttattttgcgacagaccaacaactataacagcgatgatttccagtttgtgtggaatatttacgccaataatgatgtggtggtgcccactggcggctgcgatgct

SEQ ID NO: 403 - DNA, 489 bp, Escherichia coli
ttcgcctgtaaaaccgccaatggtaccgctatccctattggcggtggcagcgctaatgtttatgtaaaccttgcgcctgccgtgaatgtggggcaaaacctggtcgtagatctttcgacgcaaatcttttgccataacgattatccggaaaccattacagactatgtcacactgcaacgaggctcggcttatggcggcgtgttatctaatttttccgggaccgtaaaatatagtggcagtagctatccatttccgaccaccagcgaaacgccgcgggttgtttataattcgagaacggataagccgtggccggtggcgctttatttgacgcctgtgagcagtgcgggcggggtggtgattaaagctggctcattaattgccgtgcttattttgcgacagaccaacaactataacagcgatgatttccagtttgtgtggaatatttacgccaataatgatgtggtggtgcctactggcggctgcgatgtt

SEQ ID NO: 404 - DNA, 489 bp, Escherichia coli
ttcgcctgtaaaaccgccaatggtacagctatccctattggcggtggcagcgctaatgtttatgtaaaccttgcgcctgccgtgaatgtggggcaaaacctggtcgtagatctttcgacgcaaatcttttgccataacgattatccggaaaccattacagactatgtcacactgcaacgaggctcggcttatggcggcgtgttatctaatttttccgggaccgtaaaatatagtggcagtagctatccatttccgaccaccagcgaaacgccgcgggttgtttataattcgagaacggataagccgtggccggtggcgctttatttgacgcctgtgagcagtgcgggcggggtggcgattaaagctggctcattaattgccgtgcttattttgcgacagaccaacaactataacagcgatgatttccagtttgtgtggaatatttacgccaataatgatgtggtggtgcctactggcggctgtgatgtt

SEQ ID NO: 405 - DNA, 489 bp, Escherichia coli
ttcgcctgtaaaaccgccaatggtaccgcaatccctattggcggtggcagcgccaatgtttatgtaaaccttgcgcctgccgtgaatgtggggcaaaacctggtcgtagatctttcgacgcaaatcttttgccataacgattacccagaaaccattacagactatgtcacactgcaacgaggttcggcttatggcggcgtgttatctagtttttccgggaccgaaaaatataatggcagtagctatcctttccctactaccagcgaaacgccgcgggttgtttataattcgagaacggataagccgtggccggtggcgctttatttgacgccggtgagcagtgcggggggagtggcgattaaagctggctcattaattgccgtgcttattttgcgacagaccaacaactataacagcgatgatttccagtttgtgtggaatatttacgccaataatgatgtggtggtgcccactggcggctgcgatgtt

SEQ ID NO: 406 - DNA, 489 bp, Escherichia coli
ttcgcctgtaaaaccgccaatggtaccgcaatccctattggcggtggcagcgccaatgtttatgtaaaccttgcgcctgccgtgaatgtggggcaaaacctggtcgtagatctttcgacgcaaatcttttgccataacgattacccagaaaccattacagactatgtcacactgcaacgaggttcggcttatggcggcgtgttatctagtttttccgggaccgtaaaatataatggcagtagctatcctttccctactaccagcgaaacgccgcgggttgtttataattcgagaacggataagccgtggccggtggcgctttatttgacgccggtgagcagtgcggggggagtggcgattaaagctggctcattaattgccgtgcttattttgcgacagaccaacaactataacagcgatgatttccagtttgtgtggaatatttacgccaataatgatgtggtggtgcccaatggcggctgtgatgtt

SEQ ID NO: 407 - DNA, 489 bp, Escherichia coli
ttcgcctgtaaaaccgccaatggtaccgcaatccctattggcggtggcagcgccaatgtttatgtaaaccttgcgcctgccgtgaatgtggggcaaaacctggtcgtggatctttcgacgcaaatcttttgccataacgattacccggaaaccattacagattatgtcacactgcaacgaggctcggcttatggcggcgtgttatctaatttttccgggaccgaaaaatataatggcagtagctatcctttccctactaccagcgaaacgccgcgggttgtttataattcgagaacggataagccgtggccggtggcgctttatttgacgcctgtgagcagtgcggggggagtggcgattaaagctggctcattaattgccgtgcttattttgcgacagaccaacaactataacagcgatgatttccagtttgtgtggaatatttacgccaataatgatgtggtggtgcccactggcggctgcgatgtt

SEQ ID NO: 408 - DNA, 489 bp, Escherichia coli
ttcgcctgtaaaaccgccaatggtaccgctatccctattggcggtggcagcgccaatgtttatgtaaaccttgcgcccgccgtgaatgtggggcaaaacctggtcgtggatctttcgacgcaaatcttttgccataacgattatccggaaaccattacagactatgtcacactgcaacgaggctcggcttatggcggcgtgttatctaatttttccgggatcgtaaaatatagtggcagtagctatccatttcctaccaccagcgaaacgccgcgcgttgtttataattcgagaacggataagccgtggccggtggcgctttatttgacgcctgtgagcagtgcgggcggggtggcgattaaagctggctcattaattgccgtgcttattttgcgacagaccaacaactataacagcgatgattttcagtttgtgtggaatatttacgccaataatgatgtggtggtgcctactggcggctgcgatgtt

SEQ ID NO: 409 - DNA, 489 bp, Escherichia coli
ttcgcctgtaaaaccgccaatggtaccgctatccctattggcggtggcagcgctaatgtttatgtaaaccttgcgcctgccgtgaatgtggggcaaaacctggtcgtagatctttcgacgcaaatcttttgccataacgattatccggaaaccattacagactatgtcacactgcaacgaggctcggcttatggcggcgtgttatctaatttttccgggaccgtaaaatatagtggcagtagctatccatttccgaccaccagcgaaacgccgcgggttgtttataattcgagaacggataagccgtggccggtggtgctttatttgacgcctgtgagcagtgcgggcggggtggcgattaaagctggctcattaattgccgtgcttattttgcgacagaccaacaactataacagcgatgatttccagtttgtgtggaatatttacgccaataatgatgtggtggtgcctactggcggctgcgatgtt

SEQ ID NO: 410 - DNA, 489 bp, Escherichia coli
ttcgcctgtaaaaccgccaatggtacagctatccctattggcggtggcagcgccaatgtttatgtaaaccttgcgcctgccgtgaatgtggggcaaaacctggtcgtagatctttcgacgcaaatcttttgccataacgattatccggaaaccattacagactatgtcacactgcaacgaggctcggcttatggcggcgtgttatctaatttttccgggaccgtaaaatatagtggcagtagctatccatttcctaccaccagtgaaacgccgcgcgttgtttataattcgagaacggataagccgtggccggtggcgctttatttgacgcctgtgagcagtgcgggcggggtggcgattaaagctggttcattaattgccgtgcttattttgcgacagaccaacaactataacagcgatgattttcagtttgtgtggaatatttacgccaataatgatgtggtggtgcccactggcggctgcgatgtt

SEQ ID NO: 411 - DNA, 489 bp, Escherichia coli
ttcgcctgtaaaaccgccaatggtacagctatccctattggcggtggcagcgctaatgtttatgtaaaccttgcgcccgccgtgaatgtggggcaaaacctggttgtggatctttcgacgcaaatcttttgccataacgattatccggaaaccattacagactatgtcacactgcaacgaggttcggcttatggcggcgtgttatctaatttttccgggaccgtaaaatatagtggcagtagctatccatttccgaccaccagtgaaacgccgcgcgttgtttataattcgagaacggataagccgtggccggtggcgctttatttgacgcctgtgagcagtgcgggcggggtggcgattaaagctggctcattaattgccgtgctaattttgcgacagaccaacaactataacagcgatgatttccagtttgtgtggaatatttacgccaataatgatgtggtggtgcctactggcggctgcgatgtt

SEQ ID NO: 412 - DNA, 489 bp, Escherichia coli
ttcgcctgtaaaaccgccaatggtaccgctatccctattggcggtggcagcgccaatgtttatgtaaaccttgcgcccgccgtgaatgtggggcaaaacctggtcgtagatctttcgacgcaaatcttttgccataacgattatccggaaaccattacagactatgtcacactgcaacgaggctcggcttatggcggcgtgttatctaatttttccgggaccgtaaaatatagtggcagtagctatccatttcctaccaccagtgaaacgccgcgcgttgtttataattcgagaacggataagccgtggccggtggcgctttatttgacgcctgtgagcagtgcgggcggggtggcgattaaagctggctcattaattgccgtgcttattttgcgacagaccaacaactataacagcgatgatttccagtttgtgtggaatatttacgccaataatgatgtggtggtgcctactggcggctgcgatgtt

SEQ ID NO: 413 - DNA, 489 bp, Escherichia coli
ttcgcctgtaaaaccgccaatggtaccgctatccctattggcggtggcagcgccaatgtttatgtaaaccttgcgcccgccgtgaatgtggggcaaaacctggtcgtggatctttcgacgcaaatcttttgccataacgattatccggaaaccattacagactatgtcacactgcaacgaggctcggcttatggcggcgtgttatctaatttttccgggaccgtaaaatatagtggcagtagctatccatttcctaccaccagcgaaacgcagcgcgttgtttataattcgagaacggataagccgtggccggtggcgctttatttgacgcctgtgagcagtgcgggcggggtggcgattaaagctggctcattaattgccgtgcttattttgcgacagaccaacaactataacagcgatgatttccagtttgtgtggaatatttactccaataatgatgtggtggtgcctactggcggctgcgatgtt

SEQ ID NO: 414 - DNA, 489 bp, Escherichia coli
ttcgcctgtaaaaccgccaatggcaccgctatccctattggcggtggcagcgccaatgtttatgtaaaccttgcgcccgccgtgaatgtggggcaaaacctggtcgtggatctttcgacgcaaatcttttgccataacgattatccggaaaccattacagactatgtcacactgcaacgaggctcggcttatggcggcgtgttatctaatttttccgggaccgtaaaatatagtggcagtagctatccatttcctaccaccagcgaaacgccgcgcgttgtttataattcgagaacggataagccgtggccggtggcgctttatttgacgcctgtgagcagtgcgggcggggtggcgattaaagctggctcattaattgccgtgcttattttgcgacagaccaacaactataacagcgatgattttcagtttgtgtggaatatttacgccaataatgatgtggtggtgcctactggcggctgcgatgtt

SEQ ID NO: 415 - DNA, 489 bp, Escherichia coli
ttcgcctgtaaaaccgccaatggcaccgctatccctattggcggtggcagcgccaatgtttatgtaaaccttgcgcccgccgtgaatgtggggcaaaacctggtcgtggatctttcgacgcaaatcttttgccataacgattacccggaaaccattacagattatgtcacactgcaacgaggctcggcttatggcggcgtgttatctaatttttccgggaccgtaaaatatagtggcagtagctatccatttccgaccaccagtgaaacgccgcgggttgtttataattcgagaacggataagccgtggccggtggcactttatttgacgcctgtgagcagtgcgggcggggtggtgattaaagctggctcattaattgccgtgcttattttgcgacagaccaacaactataacagcgatgatttccagtttgtgtggaatatttacgccaataatgatgtggtggtgcccactggcggctgcgatgtt

SEQ ID NO: 416 - DNA, 489 bp, Escherichia coli
ttcgcctgtaaaaccgccaatggtaccgctatccctattggcggtggcagcgctaatgtttatgtaaaccttgcgcctgccgtgaatgtggggcaaaacctggtcgtagatctttcgacgcaaatcttttgccataacgattatccggaaaccattacagactatgtcacactgcaacgaggctcggcttatggcggcgtgttatctaatttttccgggaccgtaaaatatagtggcagtagctatccatttccgaccaccagcgaaacgccgcgggttgtttataattcgagaacggataagccgtggccggtggcgctttatttgacgcctgtgagcagtgcgggcggggtggcgattaaagctggctcattaattgccgtgcttattttgcgacagaccaacaactataacagcgatgattttcagtttgtgtggaatatttacgccaataatgatgtggtggtgcctactggcggctgtgatgtt

SEQ ID NO: 417 - DNA, 489 bp, Escherichia coli
ttcgcctgtaaaaccgccaatggtacagctatccctattggcggtggcagcgctaatgtttatgtaaaccttgcgcctgccgtgaatgtggggcaaaacctggtcgtagatctttcgatgcaaatcttttgccataacgattatccggaaaccattacagactatgtcacactgcaacgaggctcggcttatggcggcgtgttatctaatttttccgggaccgtaaaatatagtggcagtagctatccatttccgaccaccagcgaaacgccgcgcgttgtttataattcgagaacggataagccgtggccggtggcgctttatttgacgcctgtgagcagtgcgggcggggtggcgattaaagctggctcattaattgccgtgcttattttgcgacagaccaacaactataacagcgatgatttccagtttgtgtggaatatttacgccaataatgatgtggtggtgcctactggcggctgtgatgtt

SEQ ID NO: 418 - DNA, 489 bp, Escherichia coli
ttcgcctgtaaaaccgccaatggtacagctatccctattggcggtggcagcgctaatgtttatgtaaaccttgcgcctgccgtgaatgtggggcaaaacctggtcgtagatctttcgacgcaaatcttttgccataacgattatccggaaaccattacagactatgtcacactgcaacgaggctcggcttatggcggcgtgttatctaatttttccgggaccgtaaaatatagtggcagtagctatccatttccgaccaccagcgaaacgccgcgcgttgtttataattcgagaacggataagccgtggccggtggtgctttatttgacgcctgtgagcagtgcgggcggggtggcgattaaagctggctcattaattgccgtgcttattttgcgacagaccaacaactataacagcgatgatttccagtttgtgtggaatatttacgccaataatgatgtggtggtgcctactggcggctgcgatgtt

SEQ ID NO: 419 - DNA, 489 bp, Escherichia coli
ttcgcctgtaaaaccgccaatggtacagctatccctattggcggtggcagcgctaatgtttatgtaaaccttgcgcctgccgtgaatgtggggcaaaacctggtcgtagatctttcgacgcaaatcttttgccataacgattatccggaaaccattacagactatgtcacactgcaacgaggctcggcttatggctgcgtgttatctaatttttccgggaccgtaaaatatagtggcagtagctatccatttccgaccaccagcgaaacgccgcgcgttgtttataattcgagaacggataagccgtggccggtggcgctttatttgacgcctgtgagcagtgcgggcggggtggcgattaaagctggctcattaattgccgtgcttattttgcgacagaccaacaactataacagcgatgatttccagtttgtgtggaatatttacgccaataatgatgtggtggtgcctactggcggctgcgatgtt

SEQ ID NO: 420 - DNA, 489 bp, Escherichia coli
ttcgcctgtaaaaccgccaatggtaccgctatccctattggcggtggcagcgccaatgtttatgtaaaccttgcgcccgccgtgaatgtggggcaaaacctggtcgtggatctttcgacgcaaatcttttgccataacgattatccggaaaccattacagactatgccacactgcaacgaggctcggcttatggcagcgtgttatctaatttttccgggaccgtaaaatatagtggcagtagctatccatttcctaccaccagcgaaacgccgcgcgttgtttataattcgagaacggataagccgtggccggtggcgctttatttgacgcctgtgagcagtgcgggcggggtggcgattaaagctggctcattaattgccgtgcttattttgcgacagaccaacaactataacagcgatgattttcagtttgtgtggaatatttacgccaataatgatgtggtggtgcctactggcggctgcgatgtt

SEQ ID NO: 421 - DNA, 489 bp, Escherichia coli
ttcgcctgtaaaaccgccaatggtaccgctatccctattggcggtggcagcgctaatgtttatgtaaaccttgcgcctgccgtgaatgtggggcaaagcctggtcgtagatctttcgacgcaaatcttttgccataacgattatccggaaaccattacagactatgtcacactgcaacgaggctcggcttatggccgcgtgttatctaatttttccgggaccgtaaaatatagtggcagtagctatccatttccgaccaccagcgaaacgccgcgcgttgtttataattcgagaacggataagccgtggccggtggcgctttatttgacgcctgtgagcagtgcgggcggggtggcgattaaagctggctcattaattgccgtgcttattttgcgacagaccaacaactataacagcgatgatttccagtttgtgtggaatatttacgccaataatgatgtggtggtgcctactggcggctgtgatgtt

SEQ ID NO: 422 - DNA, 489 bp, Escherichia coli
ttcgcctgtaaaaccgccaatggtacagctatccctattggcggtggcagcgctaatgtttatgtaaaccttgcgcctgtcgtgaatgtggggcaaaacctggtcgtagatctttcgacgcaaatcttttgccataacgattatccggaaaccattacagactatgtcacactgcaacgaggctcggcttatggcggcgtgttatctaatttttccgggaccgtaaaatatagtggcagtagctatccatttccgaccaccagcgaaacgccgcgcgttgtttataattcgagaacggataagccgtggccggtggcgctttatttgacgcctgtgagcagtgcgggcggggtggcgattaaagctggctcattaattgccgtgcttattttgcgacagaccaacaactataacagcgatgatttccagtttgtgtggaatatttacgccaataatgatgtggtggtgcctactggcggctgcgatgtt

SEQ ID NO: 423 - DNA, 469 bp, Escherichia coli
cgagcgccattcgtcaggctgcggatgaagtgctggcggggcagcatgatgatgaattcccgctggcaatctggcagaccggttctggcacacaaagtaacatgaacatgaacgaagtgctggccaatcgggcgagtgaactgctcggcggcgtgcgcgggatggaacgtaaagttcaccctaacgatgacgtgaacaaaagccaaagttccaacgatgtctttccgacggcgatgcacgttgcggcgctgctggcgctgcgcaagcaactcattccgcagcttaaaaccctgacacagacgctgagtgaaaaatcgcgtgcatttgccgatatcgtaaaaatcggtcgaacccacttgcaggacgccacgccgctaacactggggcaggagatttccggctgggtagcgatgctcgagcataatctcaaacatatcgaatacagcctgcctcacgtagcggaactggc

SEQ ID NO: 424 - DNA, 469 bp, Escherichia coli
cgagcgccattcgtcaggcggcggatgaagtactggcaggacagcataacgatgaattcccgctggctatctggcagaccggctccggcacgcaaagtaatatgaacatgaacgaagtgctggctaaccgggccagtgaattacttggcggcgtgcgcgggatggagcgtaaagttcatcctaacgacgacgtgaacaaaagccaaagttccaatgatgtctttccgacggcgatgcacgttgcggcgctgctggcgctgcgcaagcaactcattccgcagcttaaatccctgacacagacgctgagtgaaaaatcgcgcgcatttgccgatatcgtcaaaatcggtcgaacccacttgcaggatgccacgccgctaacactagggcaggagatttccggctgggtagcgatgctggagcataatctcaaacatatcgaatacagcctgccgcatgtagcggaactggc

SEQ ID NO: 425 - DNA, 469 bp, Escherichia coli
cgagcgccattcggcaggcggcggatgaagtactggcaggacagcatgacgacgaattcccattggctatctggcagaccggctccggcacgcaaagtaatatgaacatgaacgaagtgctggctaaccgggccagtgaattacttggcggcgtgcgcgggatggagcgtaaagttcatcctaacgacgacgtgaacaaaagccaaagttccaatgatgtctttccgacggcgatgcacgttgcggcgctgctggcgctgcgcaagcaactcattccacaacttaaaaccctgacccagacgctgagtgaaaaatcgcgcgcatttgccgatatcgtcaaaatcggtcgaacccacttgcaggatgccacgccgctaacactggggcaggagatttccggctgggtagcgatgctggagcataatctcaaacatattgaatacagcctgcctcacgtagcggaactggc

SEQ ID NO: 426 - DNA, 469 bp, Escherichia coli; identical to SEQ ID NO: 5

SEQ ID NO: 427 - DNA, 469 bp, Escherichia coli
cgagcgccattcgtcaggcggcggatgaagtactggcaggacagcatgacgacgaattcccgctggctatctggcagaccggctccggcacgcaaagtaacatgaacatgaacgaagtgctggctaaccgggccagtgaattactcggcggtgtgcgcgggatggaacgtaaagttcaccctaacgacgacgtgaacaaaagccaaagttccaacgatgtctttccgacggcgatgcacgttgcggcgctgctggcgctgcgcaagcaactcattcctcagcttaaaaccctgacacagacactgaatgagaaatcccgtgcttttgccgatatcgtcaaaattggtcgtactcacttgcaggatgccacgccgttaacgctggggcaggcgatttccggctgggtagcgatgctcgagcataatctcaaacatatcgaatacagcctgcctcacgtagcggaactggc

SEQ ID NO: 428 - DNA, 469 bp, Escherichia coli
cgagcgccattcggcaggcggcggatgaagtactggcaggacagcatgacgacgaattcccgctggctatctggcagaccggctccggcacgcaaagtaacatgaacatgaacgaagtgctggctaaccgggccagtgaattactcggcggcgtgcgcgggatggaacgtaaagttcaccctaacgacgacgtgaacaaaagccaaagttccaacgatgtctttccgacggcgatgcacgttgcggcgctgctggcgctgcgcaagcaactcattccgcagcttaaaaccctgacacagacgctgagtgaaaaatcgcgtgcatttgccgatatcgtcaaaatcggtcgaacccacttgcaggacgccacgccgctaacactagggcaggagatttccggctgggtagcgatgctcgagcataatctcaaacatatcgaatacagcctgcctcacgtagcggaactggc

SEQ ID NO: 429 - DNA, 469 bp, Escherichia coli
cgagcgccattcggcaggcggcggatgaagtactggcaggacagcatgacgacgaattcccgctggctatctggcagaccggctccggcacgcaaagtaacatgaacatgaacgaagtgctggctaaccgggccagtgaattactcggcggcgtgcgcgggatggaacgtaaagttcaccctaacgacgacgtgaacaaaagccaaagttccaacgatgtctttccgacggcgatgcacgttgcggcgctgctggcgctgcgcaagcaactcattccgcagcttaaaaccctgacacagacgctgagtgaaaaatcgcgtgcatttgccgatatcgtcaaaatcggtcgaacccacttgcaggacgccacgccgctaacactggggcaggagatttccggctgggtagcgatgctcgagtataatctcaaacatatcgaatacagcctgcctcacgtagcggaactggc

SEQ ID NO: 430 - DNA, 469 bp, Escherichia coli
cgagcgccattcggcaggcggcggatgaagtactggcaggacagcatgacgacgaattcccgctggctatctggcagaccggctccggcacgcaaagtaacatgaacatgaacgaagtgctggctaaccgggccagtgaattactcggcggtgtgcgcgggatggaacgtaaagttcaccctaacgacgacgtgaacaaaagccaaagctccaacgatgtctttccgacggcgatgcacgttgcggcgctgctggcgctgcgcaagcaactcattccgcagcttaaaaccctgacacagacactgaatgagaaatcccgtgcatttgccgatatcgtcaaaattggtcgtactcacttgcaggatgccacgccgctaacactggggcaggagatttccggctgggtagcgatgctcgagcataatctcaaacatatcgaatacagcctgcctcacgtagcggaactggc

SEQ ID NO: 431 - DNA, 469 bp, Escherichia coli
cgagcgccattcgtcaggcggcggatgaagtactggcaggacagcatgacgacgaattcccgctggctatctggcagaccggctccggcacgcaaagtaacatgaacatgaacgaagtgctggctaaccgggccagtgaattactcggcggtgtgcgcgggatggaacgcaaagttcaccctaacgacgacgtgaacaaaagccaaagttccaacgatgtctttccgacggcgatgcacgttgcggcgctgctggcgctgcgcaagcaactcattcctcagcttaaaaccctgacacagacactgaatgagaaatcccgtgcttttgccgatatcgtcaaaattggtcgtactcacttgcaggatgccacgccgttaacgctggggcaggagatttccggctggatagcgatgctcgagcataatctcaaacatatcgaatacagcctgcctcacgtagcggaactggc

SEQ ID NO: 432 - DNA, 469 bp, Escherichia coli
cgagcgccattcggcaggcggcggatgaagtactggcaggacagcatgacgacgaattcccgctggctatctggcagaccggctccggcacgcaaagtaacatgaacatgaacgaagtgctggctaaccgggccagtgaattactcggcggcgtgcgcgggatggaacgtaaagttcaccctaacgacgacgtgaacaaaagccaaagttccaacgatgtctttccgacggcgatgcacgttgcggcgctgctggcgctgcgcaagcaactcattccgcagcttaaaaccctgacgcagacactgagtgaaaaatcgcgtgcatttgccgatatcgtcaaaatcggtcgaacccacttgcaggacgccacgccgctaacactagggcaggagatttccggctgggtagcgatgctcgagcataatctcaaacatatcgaatacagcctgcctcacgtagcggaactggc

SEQ ID NO: 433 - DNA, 469 bp, Escherichia coli; identical to SEQ ID NO: 18

SEQ ID NO: 434 - DNA, 469 bp, Escherichia coli
cgagcgccattcggcaggcggcggatgaagtactggcaggacagcatgacgacgaattcccgctggctatctggcagaccggctccggcacgcaaagtaacatgaacatgaatgaagtgctggctaaccgggccagtgaattactcggcggcgtgcgcgggatggaacgtaaagttcaccctaacgacgacgtgaacaaaagccaaagttccaacgatgtctttccgacggcgatgcacgttgcggcgctgctggcgctgcgcaagcaactcattccgcagcttaaaaccctgacacagacgctgagtgaaaaatcgcgtgcatttgccgatatcgtaaaaatcggtcgaacccacttgcaggacgccaccccgctaacactggggcaggagatttccggctgggtagcgatgctcgagcataatctcaaacatatcgaatacagcctgcctcacgtagcggaactggc

SEQ ID NO: 435 - DNA, 469 bp, Escherichia coli; identical to SEQ ID NO: 22

SEQ ID NO: 436 - DNA, 469 bp, Escherichia coli; identical to SEQ ID NO: 26

SEQ ID NO: 437 - DNA, 469 bp, Escherichia coli
cgagcgccattcggcaggcggcggatgaagtactggcaggacagcatgacgacgaattcccgctggctatctggcagaccggctccggcacgcaaagtaacatgaacatgaacgaagtgctggctaaccgggccagtgaattactcggtggcgtgcgcgggatggaacgtaaagttcaccctaacgacgacgtgaacaaaagccaaagttccaacgatgtctttccgacggcgatgcacgttgcggcactactggcgctgcgcaagcaactcattccacaacttaaaaccctgacccagacgctgagtgaaaaatcccgcgcatttgccgatatcgtcaaaatcggtcgtacccacttgcaggacgccacgccgttaacgctggggcaggagatttccggctgggtagcgatgctggagcataatctcaaacatatcgaatacagcctgcctcacgtagcggaactggc

SEQ ID NO: 438 - DNA, 463 bp, Escherichia coli
cgagcgccattcggcaggcggcggatgaagtactggcaggacagcatgacgacgaattcccgctggctatctggcagaccggctccggcacgcaaagtaacatgaacgaagtgctggctaaccgggccagtgaattactcggtggcgtgcgcgggatggaacgtaaagttcaccctaacgacgacgtgaacaaaagccaaagttccaacgatgtctttccgacggcgatgcacgttgcggcactactggcgctgcgcaagcaactcattccacaacttaaaaccctgacccagacgctgagtgaaaaatcccgcgcatttgccgatatcgtcaaaatcggtcgtacccacttgcaggacgccacgccgttaacgctggggcaggagatttccggctgggtagcgatgctggagcataatctcaaacatatcgaatacagcctgcctcacgtagcggaactggc

SEQ ID NO: 439 - DNA, 469 bp, Escherichia coli
cgagcgccattcggcaggcggcggatgaagtactggcaggacagcatgacgacgaattcccgctggctatctggcagaccggctccggcacgcaaagtaacatgaacatgaacgaagtgctgtctaaccgggccagtgaattactcggcggcgtgcgcgggatggaacgtaaagttcaccctaacgacgacgtgaacaaaagccaaagttccaacgatgtctttccgacggcgatgcacgttgcggcgctgctggcgctgcgcaagcaactcattccgcagcttaaaaccctgacacagacactgaatgaaaaatcgcgtgcatttgccgatatcgtaaaaatcggtcgaacccacttgcaggacgccacgccgctaacactggggcaggagatttccgggtgggtagcgatgctcgagcataatctcaaacatatcgaatacagcctgcctcacgtagcggaactggc

SEQ ID NO: 440 - DNA, 469 bp, Escherichia coli
cgagcgccattcgtcaggcggcggatgaagtactggcaggacagcatgacgacgaattcccgctggctatctggcagaccggctccggcacgcaaagtaacatgaacatgaatgaagtgctggctaaccgggccagtgaattactcggcggcgtgcgcgggatggaacgtaaagttcaccctaacgacgacgtgaacaaaagccaaagttccaacgatgtctttccgacggcgatgcacgttgcggcgctgctggcgctgcgcaagcaactcattccacaacttaaaaccctgacccagacgctgagtgaaaaatcccgcgcatttgccgatatcgtcaaaatcggtcgtacccacttgcaggacgcgacgccgttaacgctggggcaggagatttccggctgggtagcgatgctggagcataatctcaaacatatcgaatacagcctgcctcacgtagcggaactggc

SEQ ID NO: 441 - DNA, 469 bp, Escherichia coli
cgagcgccattcggcaggcggcggatgaagtactggcaggacagcatgacgacgaattcccgctggctatctggcagaccggctccggcacgcaaagtaacatgaacatgaacgaagtgctggctaaccgggccagtgaattactcggcggcgtgcgcgggatggaacgtaaagttcaccctaacgacgacgtgaacaaaagccaaagttccaacgatgtctttccgacggcgatgcacgttgcggcgctgctggcgctgcgcaagcaactcattccgcagcttaaaaccctgacacagacgctgagtgaaaaatcccgtgcatttgccgatatcgtcaaaatcggtcgaacccacttgcaggacgccacgccgctaacactagggcaggagatttccggctgggtagcgatgctcgagcataatctcaaacatatcgaatacagcctgcctcacgtagcggaactggc

SEQ ID NO: 442 - DNA, 469 bp, Escherichia coli
cgagcgccattcggcaggcggcggatgaagtactggcaggacagcatgacgacgaattcccgctggctatctggcagaccggctccggcacgcaaagtaacatgaacatgaacgaagtgctggctaaccgggccagtgaattactcggcggcgtgcgcgggatggaacgtaaagttcaccctaacgacgacgtgaacaaaagccaaagttccaacgatgtctttccgacggcgatgcacgttgcggcgctgctggcgctgcgcaagcaactcattccgcagcttaaaaccctgacacagacactgagtgaaaaatcgcgtgcatttgccgatatcgtcaaaatcggtcgaacccacttgcaggacgccacgccgctaacactagggcaggagatttccggctgggtagcgatgctcgagcataatcttcaacatatcgaatacagcctgcctcacgtagcggaactggc

SEQ ID NO: 443 - DNA, 469 bp, Escherichia coli
cgagcgccattcgtcaggcggcggatgaagtactggcaggacagcatgacgatgaattcccgctggctatctggcagaccggctccggcacgcaaagtaacatgaacatgaacgaagtgctggctaaccgggccagtgaattactcggcggcgtgcgtgggatggagcgtaaagttcaccctaacgacgacgtgaacaaaagccaaagttctaacgatgtctttccaacggcgatgcacgttgcggcgctgctggcgctgcgcaagcaactcattccgcagcttaaaaccctgacacagacactgaatgagaaatcccgtgcatttgccgatatcgtcaaaattggtcgtactcacttgcaggatgccacgccgttaacgctggggcaggagatttccggctgggtagcgatgctggagcataatctcaaacatatcgaatacagcctgcctcacgtagcggaactggc

SEQ ID NO: 444 - DNA, 469 bp, Escherichia coli
cgagcgccattcggcaggcggcggatgaagtactggcaggacagcatgacgacgaattcccgcttgctatctggcagaccggctccggcacgcaaagtaacatgaacatgaacgaagtgctggctaaccgggccagtgaattactcggcggcgtgcgtgggatggagcgtaaagttcaccctaacgacgacgtgaacaaaagccaaagttctaacgatgtctttccaacggcgatgcacgttgcggcgctgctggcgctgcgcaagcaactcattccgcagcttaaaaccctgacacagacgctgagtgaaaaatcccgtgcatttgccgatatcgtaaaaatcggtcgaacccacttgcaggacgccacgccgctaacactggggcaggagatttccggctgggtagcgatgctcgagcataatctcaaacatattgaatacagcctgcctcacgtagcggaactggc

SEQ ID NO: 445 - DNA, 469 bp, Escherichia coli
cgagcgccattcggcaggcggcggatgaagtactggcaggacagcatgacgacgaattcccgctggctatctggcagaccggctccggcacgcaaagtaacatgaacatgaacgaagtgctggctaaccgggccagtgaattactcggcggcgtgcgcgggatggaacgtaaagttcaccctaacgacgacgtgaacaaaagccaaagttccaacgatgtctttccgacggcgatgcacgttgcggcgctgctggcgctgcgcaagcaactcattccgcagcttaaaaccctgacacagacgctgagtgaaaaatcgcgtgcatttgccgatatcgtaaaaatcggtcgaacccacttgcaggacgccacgccgctaacactggggcaggagatttccggctgggtagcgatgctcgagcataatctcaaacatatcgaatacagcctgcctcacgtagcggaactggc

SEQ ID NO: 446 - DNA, 469 bp, Escherichia coli; identical to SEQ ID NO: 23

SEQ ID NO: 447 - DNA, 469 bp, Escherichia coli
cgagcgccattcggcaggcggcggatgaagtactggcaggacagcatgacgacgaattcccgctggctatctggcagaccggctccggcacgcaaagtaacatgaacatgaacgaagtgctgtctaaccgggccagtgaattactcggcggcgtgcgcgggatggaacgtaaagttcaccctaacgacgacgtgaacaaaagccaaagttccaacgatgtctttccgacggcgatgcacgttgcggcgctgctggcgctgcgcaagcaactcattccgcagcttaaaaccctgacacagacactgaatgaaaaatcgcgtgcatttgccgatatcgtaaaaatcggtcgaacccacttgcaggacgccacgccgctaacactggggcaggagatttccggctgggtagcgatgctcgagcataatctcaaacatatcgaatacagcctgcctcacgtagcggaactggc

SEQ ID NO: 448 - DNA, 469 bp, Escherichia coli; identical to SEQ ID NO: 16

SEQ ID NO: 449 - DNA, 469 bp, Escherichia coli
cgagcgccattcgtcaggcggcggatgaagtactggcaggacagcatgacgacgaattcccgctggctatctggcagaccggctccggcacgcaaagtaacatgaacatgaacgaagtgctggctaaccgggccagtgaattactcggcggtgtgcgcgggatggaacgtaaagttcaccctaacgacgacgtgaacaaaagccaaagttccaacgatgtctttccgacggcgatgcacgttgcggcgctgctggcgctgcgcaagcaactcattcctcagcttaaaaccctgacacagacactgaatgagaaatcccgtgcttttgccgatatcgtcaaaattggtcgtactcacttgcaggatgccacgccgttaacgctggggcaggagatttccggctggatagcgatgctcgagcataatctcaaacatatcgaatacagcctgcctcacgtagcggaactggc

SEQ ID NO: 450 - DNA, 469 bp, Escherichia coli
cgagcgccattcgtcaggcggcggatgaagtactggcaggacagcatgacgatgaattcccgctggctatctggcagaccggctccggcacgcaaagtaatatgaacatgaacgaagtgctggctaaccgggccagtgaattacttggcggcgtgcgcgggatggagcgtaaagttcatcctaacgacgacgtgaacaaaagccaaagttccaatgatgtctttccgacggcgatgcacgttgcggcgctgctggcgctgcgcaagcaactcattccgcagcttaaatccctgacacagacgctgagtgaaaaatcgcgcgcatttgccgatatcgtcaaaatcggtcgaacccacttgcaggatgccacgccgctaacactagggcaggagatttccggctgggtagcgatgctggagcataatctcaaacatatcgaatacagcctgccgcatgtagcggaactggc

SEQ ID NO: 451 - DNA, 469 bp, Escherichia coli
cgagcgccattcggcaggcggcggatgaagtactggcaggacagcatgacgacgaattcccgctggctatctggcagaccggctccggcacgcaaagtaacatgaacatgaacgaagtgctggctaaccgggccagtgaattactcggcggcgtgcgcgggatggaacgtaaagttcaccctaacgacgacgtgaacaaaagccaaagttccaacgatgtctttccgacggcgatgcacgttgcggcgctgctggcgctgcgcaagcaactcattccgcagcttaaaaccctgacacagacactgagtgaaaaatcgcgtgcatttgccgatatcgtcaaaatcggtcgaacccacttgcaggatgccacgccgctaacactggggcaggagatttccggctgggtagcgatgctcgagcataatctcaaacatatcgaatacagcctgcctcacgtagcggaactggc

SEQ ID NO: 452 - DNA, 469 bp, Escherichia coli
cgagcgccattcggcaggcggcggatgaagtactggcaggacagcatgacgacgaattcccgctggctatctggcagaccggctccggcacgcaaagtaacatgaacatgaacgaagtgctggctaaccgggccagtgaattactcggcggcgtgcgcgggatggaacgtaaagttcaccctaacgacgacgtgaacaaaagccaaagttccaacgatgtctttccgacggcgatgcacgttgcggcgctgctggcgctgcgcaagcaactcattccgcagcttaaaaccctgacacagacgctgagtgaaaaatcgcgtgcatttgccgatatcgtaaaaatcggtcgaacccacttgcaggacgccacgccgctaacactggggcaggagatttccggctgggtagcgatgttcgagcataatctcaaacatatcgaatacagcctgcctcacgtagcggaactggc

SEQ ID NO: 453 - DNA, 469 bp, Escherichia coli
cgagcgccattcggcaggcggcggatgaagtactggcaggacatcatgacgacgaattcccgctggctatctggcagaccggctccggcacgcaaagtaacatgaacatgaacgaagtgctggctaaccgggccagtgaattactcggcggcgtgcgcgggatggaacgtaaagttcaccctaacgacgacgtgaacaaaagccaaagttccaacgatgtctttccgacggcgatgcacgttgcggcgctgctggcgctgcgcaagcaactcattcctcagcttaaaaccctgacacagacactgaatgagaaatcccgtgcatttgccgatatcgtcaaaattggtcgtactcacttgcaggatgccacgccgttaacactggggcaggagatttccggctgggtagcgatgctcgagcataatctcaaacatatcgaatacagcctgcctcacgtagcggaactggc

SEQ ID NO: 454 - DNA, 469 bp, Escherichia coli
cgagcgccattcggcaggcggcggatgaagtactggcaggacagcatgacgacgaattcccattggctatctggcagaccggctccggcacgcaaagtaacatgaacatgaacgaagtgctggctaaccgggccagtgaattactcggcggcgtgcgtgggatggagcgtaaagttcaccctaacgacgacgtgaacaaaagccaaagttctaacgatgtctttccaacggcgatgcacgttgcggcgctgctggcgctgcgcaagcaactcattccgcagcttaaaaccctgacacagacgctgagtgaaaaatcccgtgcatttgccgatatcgtaaaaatcggtcgaacccacttgcaggacgccacgccgcttacactggggcaggagatttccggctgggtagcgatgcttgagcataatctcaaacatattgaatacagcctgcctcacgtagcggaactggc

SEQ ID NO: 455 - DNA, 469 bp, Escherichia coli
cgagcgccattcggcaggcggcggatgaagtactggcaggacagcatgacgacgaattcccgctggctatctggcagaccggctccggcacgcaaagtaacatgaacatgaacgaagtgctggctaaccgggccagtgaattactcggcggcgtgcgtgggatggagcgtaaagttcaccctaacgacgacgtgaacaaaagccaaagttccaatgatgtctttccgacggcgatgcacgttgcggcgctactggcgctgcgcaagcaactcattccgcagcttaaaaccctgacacagacactgaatgagaaatcccgtgcatttgccgatatcgtcaaaatcggtcgaacccacttgcaggatgccacgccgctaacactggggcaggagatttccggctgggtagcgatgctcgagcataatctcaaacatatcgaatacagcctgccgcatgtagcggaactggc

SEQ ID NO: 456 - DNA, 469 bp, Escherichia coli
cgagcgccattcggcaggcggcggatgaagtactggcaggacagcatgacgacgaattcccgctggctatctggcagaccggttctggcacacaaagtaacatgaacatgaacgaagtgctggccaatcgggcgagtgaactgctcggcggcgtgcgcgggatggaacgtaaagttcaccctaacgacgacgtgaacaaaagccaaagttccaacgatgtctttccgacggcgatgcacgttgcggcgctgctggcgctgcgcaagcaactcattccgcagcttaaaaccctgacacagacactgaatgagaaatcccgtgcatttgccgatatcgtcaaaattggtcgtactcacttgcaggatgccacgccgttaacgctggggcaggagatttccggctgggtagcgatgctcgagcataatctcaaacatatcgaatacagcctgcctcacgtagcggaactggc

SEQ ID NO: 457 - DNA, 469 bp, Escherichia coli; identical to SEQ ID NO: 21

SEQ ID NO: 458 - DNA, 469 bp, Escherichia coli
cgagcgccattcggcaggcggcggatgaagtactggcaggacagcatgacgacgaattcccgctggcaatctggcagaccggctccggcacgcaaagtaacatgaacatgaacgaagtgctggctaaccgggccagtgaattactcggcggcgtgcgcgggatggaacgtaaagttcaccctaacgacgacgtgaacaaaagccaaagttccaacgatgtctttccgacggcgatgcacgttgcggcgctgctagcgctgcgcaagcaactcattccgcagcttaaaaccctgacacagacgctgaatgagaaatcgcgcgcatttgccgatatcgtcaaaattggtcgtacccacttgcaggatgccacgccgctaacactggggcaggagatttccggctgggtagcgatgctggagcataatctcaaacatatcgaatacagcctgccgcatgtagcggaactggc

SEQ ID NO: 459 - DNA, 469 bp, Escherichia coli
cgagcgccattcgtcaggcggcggatgaagtactggcaggacagcatgacgacgaattcccgctggctatctggcagaccggctccggcacgcaaagtaatatgaacatgaacgaagtgctggctaaccgggccagtgaattactcggcggcgtgcgtgggatggagcgtaaagttcaccctaacgacgacgtgaacaaaagccaaagttctaacgatgtctttccaacggcgatgcacgttgcggcgctgctggcgctgcgcaagcaactcattccgcagcttaaaaccctgacacagacactgaatgagaaatcgcgcgcatttgccgatatcgtcaaaatcggtcgaacccacttgcaggatgccacgccgctaacactggggcaggagatttccggctgggtagcgatgctcgagcataatctcaaacatatcgaatacagcctgccgcatgtagcggaactggc

SEQ ID NO: 460 - DNA, 469 bp, Escherichia coli; identical to SEQ ID NO: 27

SEQ ID NO: 461 - DNA, 469 bp, Escherichia coli
cgagcgccattcggcaggcggcggatgaagtactggcaggacagcatgacgacgaattcccgctggctatctggcagaccggctccggcacgcaaagtaacatgaacatgaacgaagtgctggctaaccgggccagtgaattactcggtggcgtgcgcgggatggaacgtaaagttcaccctaacgacgacgtgaacaaaagccaaagttccaacgatgtctttccgacggcgatgcacgttgcggcactactggcgctgcgcaagcaactcattccacaacttaaaaccctgacccagacgctgagtgaaaaatcccgcgcatttgctgatatcgtcaaaatcggtcgtacccacttgcaggacgccacgccgttaacgctggggcaggagatttccggctgggtagcgatgctggagcataatctcaaacatatcgaatacagcctgcctcacgtagcggaactggc

SEQ ID NO: 462 - DNA, 469 bp, Escherichia coli; identical to SEQ ID NO: 12

SEQ ID NO: 463 - DNA, 469 bp, Escherichia coli
cgagcgccattcggcaggcagcggatgaagtactggcaggacagcatgacgacgaattcccgctggctatctggcagaccggctccggcacgcaaagtaacatgaacatgaacgaagtgctggctaaccgggccagtgaattactcggcggcgtgcgcgggatggaacgtaaagttcaccctaacgacgacgtgaacaaaagccaaagttccaacgatgtctttccgacggcgatgcacgttgcggcgctgctggcgctgcgcaagcaactcattccgcagcttaaaaccctgacacagacgctgagtgaaaaatcccgtgcatttgccgatatcgtcaaaatcggtcgaacccacttgcaggacgccacgccgctaacactagggcaggagatttccggctgggtagcgatgctcgagcataatctcaaacatatcgaatacagcctgcctcacgtagcggaactggc

SEQ ID NO: 464 - DNA, 469 bp, Escherichia coli
ccagcgcgattatcgaggcagctgatgaagtgctggcgggaaaacatgctgatgagtttccgctggcgatttggcagaccgggtccggtacgcaaagcaacatgaatatgaatgaagtgttagcgaaccgcgccagtgaaattttgggcggcgttcgcggtatggaacgcaaagtgcatcccaatgatgacgtcaataagagtcaaagctcaaacgatgtgttcccaaccgccatgcacgtggcggcgttactggcgttacgcgaacaccttatcccgcaattatccgcattaacggatacgcttcgcgataaatcccacgctttcgccgatattgtcaaaattgggcgtactcacctgcaggacgcgacgccgctcaccttaggccaggagatttccggttgggtagccatgctggaacataacctcagacacattgagcacagtttaccgcacgtcgcggaactggc

SEQ ID NO: 465 - DNA, 469 bp, Escherichia coli
cgagcgccattcggcaggcggcggatgaagtactggcaggacagcatgacgacgaattcccgctggctatctggcagaccggctccggcacgcaaagtaacatgaacatgaacgaagtgttggctaaccgggccagtgaattactcggcggcgtgcgcgggatggaacgtaaagttcaccctaacgacgacgtgaacaaaagccaaagttccaacgatgtctttccgacggcgatgcacgttgcggcactactggcgctgcgcaagcaactcattccacaacttaaaaccctgacccagacgctgagtgaaaaatcccgcgcatttgccgatatcgtcaaaatcggtcgtacccacttgcaggacgcgacgccgttaacgctggggcaggagatttccggctgggtagcgatgctggagcataatctcaaacatatcgaatacagcctgcctcacgtagcggaactggc

SEQ ID NO: 466 - DNA, 469 bp, Escherichia coli
cgagcgccattcggcaggcggcggatgaagtactggcaggacagcatgacgacgaattcccgctggctatctggcagaccggctccggcacgcaaagtaacatgaacatgaacgaagtgctggctaaccgggccagtgaattactcggcggcgtgcgcgggatggaacgtaaagttcactctaacgacgacgtgaacaaaagccaaagttccaacgatgtctttccgacggcgatgcacgttgcggcgctgctggcgctgcgcaagcaactcattccacaacttaaaaccctgacccagacgctgagtgaaaaatcccgcgcatttgccgatatcgtcaaaatcggtcgtacccacttgcaggacgccacgccgttaacgctggggcaggagatttccggctgggtagcgatgctggagcataatctcaaacatatcgaatacagcctgcctcacgtagcggaactggc

SEQ ID NO: 467 - DNA, 469 bp, Escherichia coli
cgagcgccattcggcaggcggcggatgaagtactggcaggacagcatgacgacgaattcccgctggctatctggcagaccggctccggcacgcaaagtaacatgaacatgaacgaagtgctggctaaccgggccagtgaattactcggtggcgtgcgcgggatggaacgtaaagttcaccctaacgacgacgtgaacaaaagccaaagttccaacgatgtctttccgacggcgatgcacgttgcggcactactggcgctgcgcaagcaactcattccacaacttaaaaccctgacccagacgctgagtgaaaaatcccgcgtatttgctgatatcgtcaaaatcggtcgtacccacttgcaggacgccacgccgttaacgctggggcaggagatttccggctgggtagcgatgctcgagcataatctgaaacatatcgaatacagcctgccgcatgtagcggaactggc

SEQ ID NO: 468 - DNA, 469 bp, Escherichia coli
cgagcgccattcggcaggcggcggatgaagtactcgcaggacagcatgacgatgaattcccgctggctatctggcagaccggctccggcacgcaaagtaatatgaacatgaacgaagtgctggctaaccgggccagtgaattactcggcggtgtgcgcgggatggaacgtaaagttcaccctaacgacgacgtgaacaaaagccaaagttccaacgatgtctttccgacggcgatgcacgttgcggcgctgctggcactgcgcaagcaactcattccgcagcttaaaaccctgacacagacgctgagtgaaaaatcgcgtgcatttgccgatatcgtcaaaatcggtcgaacccacttgcaggacgccacgccgctaacactggggcaggagatttccggctgggtagcgatgctcgagcataatctcaaacatatcgaatacagcctgcctcacgtagcggaactggc

SEQ ID NO: 469 - DNA, 469 bp, Escherichia coli
cgagcgccattcggcaggcggcggatgaagtactggcaggacagcatgacgacgaattcccgctggctatctggcagaccggctccggcacgcaaagtaacatgaacatgaacgaagtgctggctaaccgggccagtgaattactcggcggcgtgcgcgggatggaacgtaaagttcaccctaacgacgacgtgaacaaaagccaaagttccaacgatgtctttccgacggcgatgcacgttgcggcgctgctggcgctgcgcaagcaactcattccacaacttaaaaccctgacccagacgctgagtgaaaaatcccgcgcatttgctgatatcgtcaaaatcggtcgtacccacttgcaggacgccacgccgttaacgctggggcaggagatttccggctgggtagcgatgctggagcataatctcaaacatatcgaatacagcctgcctcacgtagcggaactggc

SEQ ID NO: 470 - DNA, 469 bp, Escherichia coli
cgagtgctatccgtcaggcagcggatgaagtgctggcgggacagcatgacgatgaatttccgctggctatctggcagacgggttccggcacgcaaagcaacatgaatatgaacgaagtgctggccaatcgggcgagcgaactgctcggtggcgtgcgcggaatggaacgtaaaattcaccctaacgacgacgtgaacaaaagccaaagttcaaatgatgtctttccgacagcaatgcacgttgcggcgctgctggcgctacgcaagcaactcatcccgcagcttaaaacactgacacaaacgctgaatgagaaatcgcgcgcatttgccgatatcgtcaaaattggtcgtacccacttgcaggacgccacgccgctgacactgggccaggagatttccggctgggtagcgatgctggagcataatctcaaacatattgaatacagcctgccgcatgtggcggaactggc

SEQ ID NO: 471 - DNA, 469 bp, Escherichia coli
cgagcgccattcggcaggcggcagatgaagtattggcaggacagcatgacgacgaattcccgctggcaatctggcagaccggctccggcacgcaaagtaatatgaacatgaacgaagtgctggctaaccgggccagtgaattactcggcggcgtgcgtgggatggagcgtaaagttcaccctaacgacgacgtgaacaaaagccaaagttccaatgatgtctttccgacggcgatgcacgttgcggcgctactggcgctgcgcaagcaactcattccacaacttaaaacgctgacacagacactgaatgagaaatcccgtgcatttaccgacatcgtcaaaattggtcgaactcacttgcaggatgccacgccgctaacactggggcaggagatttccggctgggtagcgatgctggagcataatctcaaacatatcgaatacagcctgccgcatgtagcggaactggc

SEQ ID NO: 472 - DNA, 469 bp, Escherichia coli
cgagcgccattcggcaggcggcggatgaagtactggcaggacagcatgacgacgaattcccgctggctatctggcagaccggctccggcacgcaaagtaatatgaacatgaatgaagtgctggctaaccgggccagtgaattacttggcggcgtgcgcgggatggagcgtaaagttcatcctaacgacgacgtgaacaaaagccaaagttccaatgatgtctttccgacggcgatgcacgttgcggcgctgctggcgctgcgcaagcaactcattccgcagcttaaaaccctgacacagacgctgagtgaaaaatcccgtgcatttgccgatatcgtcaaaatcggtcgaacccacttgcaggatgccacgccgctaacactggggcaggagatttccggctgggtagcgatgctggagcataatctcaaacatattgaatacagcctgcctcacgtagcggaactggc

SEQ ID NO: 473 - DNA, 469 bp, Escherichia coli
cgagcgccattcgtcaggcggcggatgaagtactggcaggacagcatgacgacgaattcccgcttgctatctggcagaccggctccggcacgcaaagtaatatgaacatgaacgaagtgctggctaaccgggccagtgaattactcggcggcgtgcgcgggatggaacgtaaagttcaccctaacgacgacgtgaacaaaagccaaagttccaacgatgtctttccgacggcgatgcacgttgcggcactactggcgctgcgcaagcaactcattccacaacttaaaaccctgacccagacgctgagtgaaaaatcgcgcgcatttgccgatatcgtcaaaatcggtcgaacccacttgcaggatgccacgccgctaacactggggcaggagatttccggctgggtagcgatgctggagcataatctcaaacatattgaatacagcctgcctcacgtagcggaactggc

SEQ ID NO: 474 - DNA, 469 bp, Escherichia coli; identical to SEQ ID NO: 32

SEQ ID NO: 475 - DNA, 469 bp, Escherichia coli
cgagcgccattcgtcaggctgcggatgaagtgctggcggggcagcatgacgacgaattcccgctggctatctggcagaccggctccggcacgcaaagtaacatgaacatgaacgaagtgctggctaaccgggccagtgaattacttggcggcgtgcgcgggatggaacgtaaagttcaccctaacgacgacgtgaacaaaagccaaagttccaacgatgtctttccgacggcgatgcacgttgcggcgctgctggcgctgcgcaagcaactcattccgcagcttaaaaccctgacacagacgctgagtgaaaaatcgcgtgcatttgccgatatcgtcaaaattggtcgtactcacttgcaggacgccacgccgctaacactggggcaggagatttccggctgggtagcgatgctcgagcataatctcaaacatatcgaatacagcctgcctcacgtagcggaactggc

SEQ ID NO: 476 - DNA, 469 bp, Escherichia coli
cgagcgccattcggcaggcggcggatgaagtattggcaggacagcatgacgacgaattcccgctggcaatctggcagaccggctccggcacgcaaagtaatatgaacatgaacgaagtgctggctaatcgggccagtgaattacttggcggcgtgcgcgggatggagcgtaaagttcaccctaacgacgacgtgaacaaaagccaaagttccaatgatgtctttccgacggcgatgcacgttgcggcgctactggcgctgcgcaagcaactcattccgcagcttaaaaccctgacacagacgctgaatgagaaatcgcgcgcatttgccgatatcgtcaaaattggtcgtacccacttgcaggatgccacgccgctaacactggggcaggagatttccggctgggtagcgatgctggagcataatctcaaacatatcgaatacagcctgccgcatgtagcggaactggc

SEQ ID NO: 477 - DNA, 469 bp, Escherichia coli
cgagcgccattcgtcaggcggcggatgaagtactggcaggacagcatgacgacgaattcccgctggctatctggcagaccggctccggcacgcaaagtaacatgaacatgaacgaagtgctggctaaccgggccagtgaattactcggcggtgtgcgcgggatggaacgtaaagttcaccctaacgacgacgtgaacaaaagccaaagttccaacgatgtctttccgacggcgatgcacgttgcggcgctgctggcgctgcgcaagcaactcattcctcagcttaaaaccctgacacagacactgaatgagaaatcccgtgcttttgtcgatatcgtcaaaattggtcgtactcacttgcaggatgccacgccgttaacgctggggcaggagatttccggctgggtagcgatgctcgagcataatctcaaacatatcgaatacagcctgcctcacgtagcggaactggc

SEQ ID NO: 478 - DNA, 469 bp, Escherichia coli
cgagcgccattcggcaggcggcggatgaagtactggaaggacagcatgacgacgaattcccgctggctatctggcagaccggctccggcacgcaaagtaacatgaacatgaacgaagtgctggctaaccgggccagtgaattactcggcggcgtgcgcgggatggaacgtaaagttcaccctaacgacgacgtgaacaaaagccaaagttccaacgatgtctttccgacggcgatgcacgttgcggcgctgctggcgctgcgcaagcaactcattccgcagcttaaaaccctgacacagacgctgagtgaaaaatcgcgtgcatttgccgatatcgtcaaaatcggtcgaacccacttgcaggacgccacgccgctaacactggggcaggagatttccggctgggtagcgatgctcgagtataatctcaaacatatcgaatacagcctgcctcacgtagcggaactggc

SEQ ID NO: 479 - DNA, 469 bp, Escherichia coli
cgagcgccattcgtcaggcggcggatgaagtactggcaggacagcatgacgatgaattcccgctggcaatctggcagaccggctccggcacgcaaagtaacatgaacatgaacgaagtgctggctaaccgggccagtgaattactcggcggcgtgcgtgggatggtgcgtaaagttcaccctaacgacgacgtgaacaaaagccaaagttctaacgatgtctttccaacggcgatgcacgttgcggcgctgctggcgctgcgcaagcaactcattccgcagcttaaaaccctgacacagacgctgagtgaaaaatcgcgtgcatttgccgatatcgtaaaaatcggtcgaacccacttgcaggacgccacgccgctaacactggggcaggagatttccggctgggtagcgatgctcgagcataatctcaaacatattgaatacagcctgcctcacgtagcggaactggc

SEQ ID NO: 480 - DNA, 469 bp, Escherichia coli
cgagcgccattcggcaggcggcggatgaagtactggcaggacagcatgacgacgaattcccgctggctatctggcagaccggctccggcacgcaaagtaacatgaacatgaacgaagtgctggctaaccgggccagtgaattactcggcggcgtgcgcgggatggaacgtaaagttcaccctaacgacgacgtgaacaaaagccaaagttccaacgatgtctttccgacggcgatgcacgttgcggcgctgctggcgctgcgcaagcaactcattccgcagcttaaaaccctgacacagacgctgaatgagaaatcccgtgcatttgccgatatcgtaaaaatcggtcgaacccacttgcaggacgccacgccgctaacactggggcaggagatttccggctgggtagcgatgctcgagcataatctcaaacatatcgaatacagcctgcctcacgtagcggaactggc

SEQ ID NO: 481 - DNA, 469 bp, Escherichia coli
cgagcgccattcgtcaggcggcggatgaagtactggcaggacagcatgacgacgaattcccgctggctatctggcagaccggctccggcacgcaaagtaacatgaacatgaacgaagtgctggctaaccgggccagtgaattactcggcggtgtgcgcgggatggaacgtaaagttcaccctaacgacgacgtgaacaaaagccaaagctccaacgatgtctttccgacggcgatgcacgttgcggcgctgctggcgctgcgcaagcaactcattccgcagcttaaaaccctgacacagacactgaatgagaaatcccgtgcatttgccgatatcgtcaaaattggtcgtactcacttgcaggatgccacgccgttaacgctggggcaggagatttccggctgggtagcgatgctggagcataatctcaaacatattgaatacagcctgcctcacgtagcggaactggc

SEQ ID NO: 482 - DNA, 469 bp, Escherichia coli
cgagcgccattcgtcaggcggcggatgaagtactggcaggacagcatgacgacgaattcccgctggctatctggcagaccggctccggcacgcaaagtaacatgaacatgaacgaagtgctggctaaccgggccagtgaattactcggcggtgtgcgcgggatggaacgtaaagttcaccctaacgacgacgtgaacaaaagccaaagctccaacgatgtctttccgacggcgatgcacgttgcggcgttgctggcgctgcgcaagcaactcattccgcagcttaaaaccctgacacagacactgaatgagaaatcccgtgcatttgccgatatcgtcaaaattggtcgtactcacttgcaggatgccacgccgttaacgctggggcaggagatttccggctgggtagcgatgctggagcataatctcaaacatattgaatacagcctgcctcacgtagcggaactggc

SEQ ID NO: 483 - DNA, 469 bp, Escherichia coli
cgagcgccattcggcaggcggcggatgaagtactggcaggacagcatgacgacgaattcccgctggctatctggcagaccggctccggcacgcaaagtaacatgaacatgaacgaagtgctggctaaccgggccagtgaattactcggcggtgtgcgcgggatggaacgtaaagttcaccctaacgacgacgtgaacaaaagccaaagttccaacgatgtctttccgacggcgatgcacgttgcggcgctgctggcactgcgcaagcaactcattccgcagcttaaaaccctgacacagacgctgagtgaaaaatcgcgtgcatttgccgatatcgtcaaaatcggtcgaacccacttgcaggacgccacgccgctaacactagggcaggagatttccggctgggtagcgatgctcgagcataatctcaaacatatcgaatacagcctgcctcacgtagcggaactggc

SEQ ID NO: 484 - DNA, 469 bp, Escherichia coli
cgagcgccattcggcaggcggcggatgaagtactggcaggacagcatgacgacgaattcccgctggctatctggcagaccggctccggcacgcaaagtaacatgaacatgaacgaagtgctggctaaccgggccagtgaattactcggcggcgtgcgcgggatggaacgtaaagttcaccctaacgacgacgtgaacaaaagccaaagttcaaacgatgtctttccgacggcgatgcacgttgcggcgctgctggcgctgcgcaagcaactcattccgcaggttaaaaccctgacacagacactgagtgaaaaatcgcgtgcatttgccgatatcgtcaaaatcggtcgaacccacttgcaggacgccacgccgctaacactggggcaggagatttccggctgggtagcgatgctcgagcataatctcaaacatatcgaatacagcctgcctcacgtagcggaactggc

SEQ ID NO: 485 - DNA, 469 bp, Escherichia coli
cgagcgccattcggcaggcggcggatgaagtactggcaggacagcatgacgacgaattcccgctggctatctggcagaccggctccggcacgcaaagtaacatgaacatgaacgaagtgctggctaaccgggccagtgaattactcggcggcgtgcgcgggatggaacgtaaagttcaccctaacgacgacgtgaacaaaagccaaagttccaacgatgtctttccgacggcgatgcacgttgcggcgctgctggcgctgcgcaagcaactcattccgcaggttaaaaccctgacacagacactgagtgaaaaatcgcgtgcatttgccgatatcgtcaaaatcggtcgaacccacttgcaggacgccacgccgctaacactggggcaggagatttccggctgggtagcgatgctcgagcataatctcaaacatatcgaatacagcctgcctcacgtagcggaactggc

SEQ ID NO: 486 - DNA, 469 bp, Escherichia coli
cgagcgccattcggcaggcggcggatgaagtactggcaggacagcatgacgacgaattcccgctggctatctggcagaccggctccggcacgcaaagtaacatgaacatgaatgaagtgctggctaaccgggccagtgaattactcggcggcgtgcgcgggatggaacgtaaagttcaccctaacgacgacgtgaacaaaagccaaagttccaacgatgtctttccgacggcgatgcacgttgcggcactactggcgctgcgcaagcaactcattcctcaacttaaaaccctgacccagacgctgagtgaaaaatcccgcgcatttgccgatatcgtcaaaatcggtcgtactcacttgcaggacgccacgccgttaacgctggggcaggagatttccggctgggtagcgatgctggagcataatctcaaacatatcgaatacagcctgcctcacgtagcggaactggc

SEQ ID NO: 487 - DNA, 469 bp, Escherichia coli
cgagcgccattcggcaggcggcggatgaagtactggcaggacagcatgacgacgaattcccgctggctatctggcagaccggctccggcacgcaaagtaacatgaacatgaacgaagtgctggctaaccgggccagtgaattactcggcggcgtgcgcgggatggaacgtaaagttcaccctaacgacgacgtcaacaaaagccaaagttccaacgatgtctttccgacggcgatgcacgttgcggcgctgctggcgctgcgcaagcaactcattccgcagcttaaaaccctgacacagacgctgagtgaaaaatcgcgtgcatttgccgatatcgtcaaaatcggtcgaacccacttgcaggacgccacgccgctaacactagggcaggagatttccggctgggtagcgatgctcgagcataatctcaaacatatcgaatacagcctgcctcacgtagcggaactggc

SEQ ID NO: 488 - DNA, 469 bp, Escherichia coli
cgagcgccattcgtcaggcggcggatgaagtactggcaggacagcatgacgatgaattcccgctggcaatctggcagaccggctccggcacgcaaagtaatatgaacatgaacgaagtgctggctaatcgggccagtgaattacttggcggcgtgcgcgggatggagcgtaaagttcatcctaacgacgacgtgaacaaaagccaaagttccaacgatgtctttccgacggcgatgcacgttgcggcgctgctggcgctgcgcaagcaactcattccacagcttaaaaccctgacacagacgctgagtgaaaaatcgcgcgcatttgccgatatcgtcaaaattggtcgtacccacttgcaggatgccacgccgctaacactggggcaggagatttccggctgggtagcgatgctcgagcataatctcaaacatattgaatacagcctgcctcacgtagcggaactggc

SEQ ID NO: 489 - DNA, 469 bp, Escherichia coli
cgagcgccattcggcaggcggcggatgaagtactggcaggacagcatgacgacgaattcccgctggctatctggcagaccggctccggcacgcaaagtaacatgaacatgaacgaagtgctggctaaccgggccagtgaattactcggtggcgtgcgcgggatggaacgtaaagttcaccctaacgacgacgtgaacaaaagccaaagttccaacgatgtctttccgacggcgatgcacgttgcggcactactggcgctgcgcaagcaactcattccacaacttaaaaccctgacccagacgctgagtgaaaaatcccgcgcatttgctgatatcgtcaaaatcggtcgtacccacttgcaggacgccacgccgttaacgctggggcaggagatttccggctgggtagcgatgctcgagcataatctgaaacatatcgaatacagcctgccgcatgtagcggaactggc

SEQ ID NO: 490 - DNA, 469 bp, Escherichia coli
cgagcgccattcggcaggcggcggatgaagtactggcaggacagcatgacgacgaattcccgctggctatctggcagaccggctccggcacgcaaagtaacatgaacatgaacgaagtgctggctaaccgggccagtgaattactcggcggcgtgcgcgggatggaacgtaaagttcaccctaacgacgacgtgaacaaaagccaaagttccaacgatgtctttccgacggcgatgcacgttgcggcgctgctggcgctgcgcaagcaactcattccgcagcttaaaaccctgacacagacgctgagtgaaaaatcgcgtgcatttgccgatatcgtcaaaatcggtcgaacccacttgcaggacgccacgccgctaacactagggcaggagatttccggctgggtagcgatgctcgagcataatctcaaacatatcgaatccagcctgcctcacgtagcggaactggc

SEQ ID NO: 491 - DNA, 469 bp, Escherichia coli
cgagcgccattcggcaggcggcggatgaagtactggcaggacagcatgacgacgaattcccgctggctatctggcagaccggctccggcacgcaaagtaacatgaacatgaacgaagtgctggctaaccgggccagtgaattactcggcggcgtgcgcgggatggaacgtaaagttcaccctaacgacgacgtgaacaaaagccaaagctccaacgatgtctttccgacggcgatgcacgttgcggcgctgctggcgctgcgcaagcaactcattccgcagcttaaaaccctgacacagacgctgagtgaaaaatcgcgtgcatttgccgatatcgtaaaaatcggtcgaacccacttgcaggacgccacgccgctaacactggggcaggagatttccggctgggtagcgatgctcgagcataatctcaaacatatcgaatacagcctgcctcacgtagcggaactggc

SEQ ID NO: 492 - DNA, 469 bp, Escherichia coli
cgagcgccattcggcaggcggcggatgaagtactggcaggacagcatgacgacgaattcccgctggctatctggcagaccggctccggcacgcaaagtaacatgaacatgaacgaagtgctggctaaccgggccagtgaattactcggcggcgtgcgcgggatggaacgtaaagttcaccctaacgacgacgtgaacaaaagccaaagttccaacgatgtctttccgacggcgatgcacgttgcggcgctgctggcgctgcgcaagcaactcattccgcagcttaaaaccctgacacagacactgaatgagaaatcccgtgcttttgccgatatcgtcaaaattggtcgtactcacttgcaggatgccacgccgttaacgctggggcaggagatttccggctgggtagcgatgctcgagcataatctcaaacatatcgaatacagcctgcctcacgtagcggaactggc

SEQ ID NO: 493 - DNA, 469 bp, Escherichia coli
cgagcgccattcgtcaggcggcggatgaagtactggcaggacagcatgacgacgaattcccgctggctatctggcagaccggctccggcacgcaaagtaacatgaacatgaacgaagtgctggctaaccgggccagtgaattactcggcggtgtgcgcgggatggaacgtaaagttcaccctaacgacgacgtgaacaaaagccaaagctccaacgatgtctttccgacggcgatgcacgttgcggcgctgctggcgctgcgcaagcaactcattccgcagcttaaaaccctgacacagacactgaatgagaaatcccgtgcatttgccgatatcgtcaaaattggtcgtactcacttgcaggatgccacgccgttaacgctggggcaggagatttccggctgggtagcgatgctcgagcataatctcaaacatatcgaatacagcctgcctcacgtagcggaactggc

SEQ ID NO: 494 - DNA, 469 bp, Escherichia coli
cgagcgccattcgtcaggcggcggatgaagtactggcaggacagcatgacgacgaattcccgctggctatctggcagaccggctccggcacgcaaagtaacatgaacatgaacgaagtgctggctaaccgggccagtgaattactcggcggcgtgcgcgggatggaacgtaaagttcaccctaacgacgacgtgaacaaaagccaaagttccaacgatgtctttccgacggcgatgcacgttgcggcgctgctggcgctgcgcaagcaactcattccgcagcttaaaaccctgacacagacactgagtgaaaaatcgcgtgcatttgccgatatcgtcaaaatcggtcgaactcacttgcaggacgccacgccgctaacactagggcaggagatttccggctgggtagcgatgctcgagcataatctcaaacatatcgaatacagcctgcctcacgtagcggaactggc

SEQ ID NO: 495 - DNA, 469 bp, Escherichia coli
cgagcgccattcgtcaggcggcggatgaagtactggcaggacagcatgacgacgaattcccgctggctatctggcagaccggctccggcacgcaaagtaacatgaacatgaacgaagtgctggctaaccgggccagtgaattactcggcggcgtgcgcgggatggaacgtaaagttcaccctaacgacgacgtgaacaaaagccaaagttccaacgatgtctttccgacggcgatgcacgttgcggcgctgctggcgctgcgcaagcaactcattccgcagcttaaaaccctgacacagacactgagtgagaaatcgcgtgcatttgccgatatcgtcaaaatcggtcgtactcacttgcaggacgccacgccgctaacactagggcaggagatttccggctgggtagcgatgctcgagcataatctcaaacatatcgaatacagcctgcctcacgtagcggaactggc

SEQ ID NO: 496 - DNA, 469 bp, Escherichia coli
cgagcgccattcggcaggcggcggatgaagtactggcaggacagcatgacgacgaattcccgctggctatctggcagaccggctccggcacgcaaagtaacatgaacatgaacgaagtgctggctaaccgggccagtgaattactcggcggtgtgcgcgggatggaacgtaaagttcaccctaacgacgacgtgaacaaaagccaaagttccaacgatgtctttccgacggcgatgcacgttgcggcgctgctggcactgcgcaagcaactcattccgcagcttaaaaccctgacacagacgctgagtgaaaaatcgcgtgcatttgccgatatcgtcaaaatcggtcgaacccacttgcaggacgccatgccgctaacactagggcaggagatttccggctgggtagcgatgctcgagcataatctcaaacatatcgaatacagcctgcctcacgtagcggaactggc

SEQ ID NO: 497 - DNA, 460 bp, Escherichia coli
cgagcgccattcggcaggcggcggatgaagtactggcaggacagcatgacgacgaattcccgctggctatctggcagaccggctccggcacgcaaagtaacatgaacatgaacgaagtgctggctaaccgggccagtgaattactcggcggcgtgcgcgggatggaacgtaaagttcaccctaacgacgacgtgaacaaaagccaaagttccaacgatgtctttccgacggcgatgcacgttgcggcgctgcgcaagcaactcattccgcagcttaaaaccctgacgcagacactgagtgaaaaatcgcgtgcatttgccgatatcgtcaaaatcggtcgaacccacttgcaggacgccacgccgctaacactagggcaggagatttccggctgggtagcgatgctcgagcataatctcaaacatatcgaatacagcctgcctcacgtagcggaactggc

SEQ ID NO: 498 - DNA, 469 bp, Escherichia coli
cgagcgccattcgtcaggcggcggatgaagtactggcaggacagcatgacgacgaattcccgctggctatctggcagaccggctccggcacgcaaagtaacatgaacatgaacgaagtgctggctaaccgggccagtgaattactcggcggcgtgcgcgggatggaacgtaaagttcaccctaacgacgacgtgaacaaaagccaaagctccaacgatgtctttccgacggcgatgcacgttgcggcgctgctggcgctgcgcaagcaactcattccgcagcttaaaaccctgacacagacactgaatgagaaatcccgtgcatttgccgatatcgtcaaaatcggtcgtactcacttgcaggacgccacgccgctaacgctggggcaggagatttccggctgggtagcgatgctcgagcataatctcaaacatatcgaatacagcctgcctcacgtagcggaactggc

SEQ ID NO: 499 - DNA, 469 bp, Escherichia coli
cgagcgccattcggcaggcggcggatgaagtactggcaggacagcatgacgacgaattcccattggctatctggcagaccggctccggcacgcaaagtaacatgaacatgaacgaagtgctggctaaccgggccagtgaattactcggcggcgtgcgtgggatggagcgtaaagttcaccctaacgacgacgtgaacaaaagccaaagttctaacgatgtctttccaacggcgatgcacgttgcggtgctgctggcgctgcgcaagcaactcattccgcagcttaaaaccctgacacagacgctgagtgaaaaatcccgtgcatttgccgatatcgtaaaaatcggtcgaacccacttgcaggacgccacgccgctaacactggggcaggagatttcccgctgggtagcgatgctcgagcataatctcaaacatattgaatacagcctgcctcacgtagcggaactggc

SEQ ID NO: 500 - DNA, 469 bp, Escherichia coli
cgagcgccattcggcaggcggcggatgaagtactagcaggacagcatgacgacgaattcccgctggctatctggcagaccggctccggcacgcaaagtaacatgaacatgaacgaagtgctggctaaccgggccagtgaattactcggcggtgtgcgcgggatggaacgtaaagttcaccctaacgacgacgtgaacaaaagccaaagttccaacgatgtctttccgacggcgatgcacgttgcggcgctgctggcactgcgcaagcaactcattccgcagcttaaaaccctgacacagacgctgagtgaaaaatcgcgtgcatttgccgatatcgtcaaaatcggtcgaacccacttgcaggacgccacgccgctaacactagggcaggagatttccggctgggtagcgatgctcgagcataatctcaaacatatcgaatacagcctgcctcacgtagcggaactggc

SEQ ID NO: 501 - DNA, 469 bp, Escherichia coli
cgagcgccattcgtcaggctgcggatgaagtgctggcggggcagcatgatgatgaattcccgctggcaatctggcagaccggttctggcacacaaagtaacatgaacatgaacgaagtgctggccaatcgggcgagtgaactgctcggcggcgtgcgcgggatggaacgtaaagttcaccctaacgatgacgtgaacaaaagccaaagttccaacgatgtctttccgacggcgatgcacgttgcggcgctgctggcgctgcgcaagcaactcattccgcagcttaaaaccctgacacagacgctgagtgaaaaatcgcgtgcatttgccgatatcgtaaaaatcggtcgaacccacttgcaggacgacacgccgctaacactggggcaggagatttccggctgggtagcgatgctcgagcataatctcaaacatatcgaatacagcctgcctcacgtagcggaactggc

SEQ ID NO: 502 - DNA, 469 bp, Escherichia coli
cgagcgccattcggcaggcggcggatgaagtactggcaggacagcatgacgacgaattcccgctggctatctggcagaccggctccggcacgcaaagtaacatgaacatgaacgaagtgctggctaaccgggccagtgagttactcggcggcgtgcgcgggatggaacgtaaagttcaccctaacgacgacgtgaacaaaagccaaagttccaacgatgtctttccgacggcgatgcacgttgcggcgctgctggcgctgcgcaagcaactcattccgcagcttaaaaccctgacacagacgctgagtgaaaaatcgcgtgcatttgccgatatcgtaaaaatcggtcgaacccacttgcaggacgccacgccgctaacactggggcaggagatttccggctgggtagcgatgctcgagcataatctcaaacatatcgaatacagcctgcctcacgtagcggaactggc

SEQ ID NO: 503 - DNA, 469 bp, Escherichia coli
cgagcgccattcgtcaggcggcggatgaagtactggcaggacagcatgacgacgaattcccgctggctatctggcagaccggctccggcacgcaaagtaacatgaacatgaacgaagtgctggctaaccgggccagtgaattactcggcggcgtgcgcgggatggaacgtaaagttcaccctaacgacgacgtgaacaaaagccaaagttccaacgatgtctttccgacggcgatgcacgttgcggcgctgctggcgctgcgcaagcaactcattccgcagcttaaaaccctgacacagacgctgagtgagaaatcccgtgcatttgccgatatcgtcaaaatcggtcgaactcacttgcaggacgccacgccgctaaccctggggcaggagatttccggctgggtagcgatgctcgagcataatctcaaacatatcgaatacagcctgcctcacgtagcggaactggc

SEQ ID NO: 504 - DNA, 469 bp, Escherichia coli
cgagcgccattcggcaggcggcggatgaagtactggcaggacagcatgacgacgaattcccgctggctatctggcagaccggctccggcacgcaaagtaacatgaacatgaacgaagtgctggctaaccgggccagtgaattactcggcggcgtgcgcgggatggaacgtaaagttcaccctaacgacgacgtgaacaaaagccaaagttccaacgatgtctttccgacggcgatgcacgttgcggcgctgctggcgctgcgcaagcaactcattccgcagcttaaaaccctgacacagacactgagtgaaaaatcgcgtgcatttgccgatatcgtcaaaatcggtcgaacccacttgcaggacgccacgccgctaacactagggcaggagatttccggctgggtagcgatgcttgagcataatctcaaacatatcgaatacagcctgcctcacgtagcggaactggc

SEQ ID NO: 505 - DNA, 469 bp, Escherichia coli
cgagcgccattcggcaggcggcggatgaagtactggcaggacagcatgacgacgaattcccgctggctatctggcagaccggctccggcacgcaaagtaacatgaacatgaacgaagtgctggctaaccgggccagtgaattactcggcggtgtgcgcgggatggaacgtaaagttcaccctaacgacgacgtgaacaaaagccaaagttccaacgatgtctttccgacggcgatgcacgttgcggcgctgctggcgctgcgcaagcaactcattccgcagcttaaaaccctgacacagacgctgagtgaaaaatcgcgtgcatttgccgatatcgtcaaaatcggtcgaacccacttgcaggacgccacgccgctaacactagggcaggagatttccggctgggtagcgatgctcgagcataatctcaaacatatcgaatacagcctgcctcacgtagcggaactggc

SEQ ID NO: 506 - DNA, 469 bp, Escherichia coli
cgagcgccattcgtcaggcggcggatgaagtactggcaggacagcatgacgacgaattcccgctggctatctggcagaccggctccggcacgcaaagtaacatgaacatgaacgaagtgctggctaaccgggccagtgaattactcggcggcgtgcgcgggatggaacgtaaagttcaccctaacgacgacgtgaacaaaagccaaagttccaacgatgtctttccgacggcgatgcacgttgcggcgctgctggcactgcgcaagcaactcattccgcagcttaaaaccctgacacagacactgaatgagaaatcccgtgcatttgccgatatcgtcaaaattggtcgtactcacttgcaggatgccacgccgcttacactggggcaggagatttccggctgggtagcgatgctcgagcataatctcaaacatatcgaatacagcctgcctcacgtagcggaactggc

SEQ ID NO: 507 - DNA, 469 bp, Escherichia coli
cgagcgccattcggcaggcggcggatgaagtactggcaggacagcatgacgacgaattcccgctggctatctggcagaccggctccggcacgcaaagtaacatgaacatgaacgaagtgctggttaaccgggccagtgaattactcggtggcgtgcgcgggatggaacgtaaagttcaccctaacgacgacgtgaacaaaagccaaagttccaacgatgtctttccgacggcgatgcacgttgcggcactactggcgctgcgcaagcaactcattccacaacttaaaaccctgacccagacgctgagtgaaaaatcccgcgcatttgccgatatcgtcaaaatcggtcgtacccacttgcaggacgccacgccgttaacgctggggcaggagatttccggctgggtagcgatgctggagcataatctcaaacatatcgaatacagcctgcctcacgtagcggaactggc

SEQ ID NO: 508 - DNA, 469 bp, Escherichia coli
cgagcgccattcgtcaggcggcggatgaagtactggcaggacagcatgacgacgaattcccgctggctatctggcagaccggctccggcacgcaaagtaacatgaacatgaacgaagtgctggctaaccgggccagtgaattactcggcggtgtgcgcgggatggaacgtaaagttcaccctaacgacgacgtgaacaaaagccaaagttccaacgatgtctttccgacggcgatgcacgttgcggcgctgctggcgctgcgcaagcaactcattccgcagcttaaaaccctgacacagacactgaatgagaaatcccgtgcttttgccgatatcgtcaaaattggtcgtactcacttgcaggatgccacgccgttaacgctggggcaggagatttccggctgggtagcgatgctcgagcataatctcaaacatatcgaatacagcctgcctcacgtagcggaactggc

SEQ ID NO: 509 - DNA, 469 bp, Escherichia coli
cgagtgccattcgtcaggcggcagatgaagtgctggcgggacagcatgacgatgaatttccgctggctatctggcagaccggttccggtacgcaaagcaatatgaatatgaacgaagtgctggctaaccgggcgagcgaattgctcggcggcgtgcgcgggatggaacgtaaagttcaccctaatgacgacgtgaacaaaagccaaagttccaacgatgtctttccgacggcgatgcacgttgcggcgctgctggcgctgcgcaagcaactcattccgcagcttaaaaccctgacacagacgctgagtgaaaaatcgcgtgcatttgccgatatcgtcaaaattggtcgtacccacttgcaggacgccacgccgctgacgctggggcaggagatttctggctgggtagcgatgctggagcataatctcaaacatatcgagtacagtctgccgcacgtggcggaactggc

SEQ ID NO: 510 - DNA, 469 bp, Escherichia coli
cgagcgccattcgtcaggcggcggatgaagtactggcaggacagcatgacgacgaattcccgctggctatctggcagaccggctccggcacgcaaagtaatatgaacatgaacgaagtgctggctaatcgggccagtgaattacttggcggcgtgcgcgggatggagcgtaaagttcaccctaacgacgacgtgaacaaaagccaaagttccaatgatgtctttccgacggcgatgcacgttgcggcgctactggcgctgcgcaagcaactcattccgcagcttaaaaccctgacacagacactgaatgagaaatcccgtgcatttgccgatatcgtcaaaatcggtcgaacccacttgcaggatgccacgccgctaacactggggcaggagatttccggctgggtagcgatgctcgagcataatctcaaacatatcgaatacagcctgccgcatgtagcggaactggc

SEQ ID NO: 511 - DNA, 469 bp, Escherichia coli
cgagcgccattcggcaggcggcggatgaagtactggcaggacagcatgacgacgaattcccactggctatctggcagactggctccggcacgcaaagtaacatgaacatgaacgaagtgctggctaaccgggccagtgaattactcggcggcgtgcgtgggatggagcgtaaagttcaccctaacgacgacgtgaacaaaagccaaagttctaacgatgtctttccaacggcgatgcacgttgcggcgctgctggcgctgcgcaagcaactcattccgcagcttaaaaccctgacacagacgctgagtgaaaaatcgcgtgcatttgccgatatcgtaaaaatcggtcgaacccacttgcaggacgccacgccgctaacactggggcaggagatttccggctgggtagcgatgctcgagcataatctcaaacatattgaatacagcctgcctcacgtagcggaactggc

SEQ ID NO: 512 - DNA, 469 bp, Escherichia coli
cgagcgccattcggcaggcggcggatgaagtactggcaggacagcatgacgacgaattcccgctggctatctggcagaccggctccggcacgcaaagtaacatgaacatgaacgaagtgctggctaaccgggccagtgaattactcggcggcgtgcgcgggatggaacgtaaagttcaccctaacgacgacgtgaacaaaagccaaagttccaacgatgtctttccgacggcgatgcacgttgcggcgctgctggcgctgcgcaagcaactcattcctcagcttaaaaccctgacacagacactgaatgagaaatcccgtgcatttgccgatatcgtcaaaattggtcgtactcacttgcaggatgccacgccgttaacactggggcaggagatttccggctgggtagcgatgctcgagcataatctcaaacatatcgaatacagcctgcctcacgtagcggaactggc

SEQ ID NO: 513 - DNA, 469 bp, Escherichia coli
cgagcgccattcggcaggcggcggatgaagtactggcaggacagcatgacgacgaattcccgctggctatctggcagaccggctccggcacgcaaagtaacatgaacatgaacgaagtgctggctaaccgggccagtgaattactcggcggcgtgcgcgggatggaacgtaaagttcaccctaacgacgacgtgaacaaaagccaaagttccaacgatgtctttccgacggcgatgcacgttgcggcgctgctggcgctgcgcaagcaactcattccgcagcttaaaaccctgacacagacgctgagtgaaaaatcgcgtgcatttgccgatatcgtcaaaatcggtcgaacccacttgcaggacgccacgccgctaacactggggcaggagatttccggatgggtagcgatgctcgagtataatctcaaacatatcgaatacagcctgcctcacgtagcggaactggc

SEQ ID NO: 514 - DNA, 469 bp, Escherichia coli
cgagcgccattcggcaggcggcggatgaagtactggcaggacagcatgacgacgaattcccgctggctatctggcagaccggctccggcacgcaaagtaacatgaacatgaacgaagtgctggctaaccgggccagtgaattactcggcggcgtgcgcgggatggaacgtaaagttcaccctaacgacgacgtgaacaaacgccaaagttccaacgatgtctttccgacggcgatgcacgttgcggcgctgctggcgctgcgcaagcaactcattccgcagcttaaaaccctgacacagacactgagtgaaaaatcgcgtgcatttgccgatatcgtcaaaatcggtcgaacccacttgcaggacgccacgccgctaacactagggcaggagatttccggctgggtagcgatgctcgagcataatctcaaacatatcgaatacagcctgcctcacgtagcggaactggc

SEQ ID NO: 515 - DNA, 469 bp, Escherichia coli
cgagcgccattcgtcaggcggcggatgaagtactggcaggacagcatgacgacgaattcccgctggctatctggcagaccggctccggcacgcaaagtaacatgaacatgaacgaagtgctggctaaccgggccagtgaattactcggcggtgtgcgcgggatggaacgtaaagttcaccctaacgatgacgtgaacaaaagccaaagttccaacgatgtctttccgacggcgatgcacgttgcggcgctgctggcgctgcgcaagcaactcattccgcagcttaaaaccctgacacagacactgaatgagaaatcccgtgcatttgccgatatcgtcaaaattggtcgtactcacttgcaggatgccacgccgttaacgctggggcaggagatttccggctgggtagcgatgctcgagcataatctcaaacatatcgaatacagcctgcctcacgtagcggaactggc

SEQ ID NO: 516 - DNA, 469 bp, Escherichia coli
cgagcgccattcggcaggcggcggatgaagtactggcaggacagcatgacgacgaattcccgctggctatctggcagaccggctccggcacgcaaagtaacatgaacatgaacgaagtgctggctaaccgggccagtgaattactcggcggcgtgcgcgggatggaacgtaaagttcaccctaacgacgatgtgaacaaaagccaaagttccaacgatgtctttccgacggcgatgcacgttgcggcgctgctggcgctgcgcaagcaactcattccgcagcttaaaaccctgacacagacgctgagtgaaaaatcgcgtgcatttgccgatatcgtcaaaatcggtcgaacccacttgcaggacgccacgccgctaacactggggcaggagatttccggctgggtagcgatgctcgagtataatctcaaacatatcgaatacagcctgcctcacgtagcggaactggc

SEQ ID NO: 517 - DNA, 469 bp, Escherichia coli
cgagcgccattcggcaggcggcggatgaagtactggcaggacagcatgacgacgaattcccgctggctatctggcagaccggctccggcacgcaaagtaacatgaacatgaacgaagtgctggctaaccgggccagtgaattactcggcggcgtgcgcgggatggaacgtaaagttcaccctaacgacgacgtcaacaaaagccaaagttccaacgatgtctttccgacggcgatgcacgttgcggcgctgctggcgctgcgcaagcaactcattccgcagcttaaaaccctgacacagacgctgagtgaaaaatcgcgtgcatttgccgatatcgtaaaaatcggtcgaacccacttgcaggacgccacgccgctaacactggggcaggagatttccggctgggtagcgatgctcgagcataatctcaaacatatcgaatacagcctgcctcacgtagcggaactggc

SEQ ID NO: 518 - DNA, 469 bp, Escherichia coli
cgagcgccattcggcaggcggcggatgaagtactggcaggacagcatgacgacgaattcccgctggctatctggcagaccggctccggcacgcaaagtaacatgaacatgaacgaagtgctggctaaccgggccagtgaattactcggtggcgtgcgcgggatggaacgtaaagttcaccctaacgacgacgtgaacaaaagccaaagttccaacgatgtctttccgactgcgatgcacgttgcggcgctgctggcgctgcgcaagcaactcattccacaacttaaaaccctgacccagacgctgagtgaaaaatcccgcgcatttgccgatatcgtcaaaatcggtcgtacccacttgcaggacgcgacgccgttaacgctggggcaggagatttccggctgggtagcgatgctggagcataatctcaaacatatcgaatacagcctgcctcacgtagcggaactggc

SEQ ID NO: 519 - DNA, 469 bp, Escherichia coli
cgagcgccattcggcaggcggcggatgaagtactggcaggacagcatgacgacgaattcccgctggctatctggcagaccggctccggcacgcaaagtaacatgaacatgaacgaagtgctggctaaccgggccagtgaattactcggcggcgtgcgcgggatggaatgtaaagttcaccctaacgacgacgtgaacaaaagccaaagttccaacgatgtctttccgacggcgatgcacgttgcggcgctgctggcgctgcgcaagcaactcattccgcagcttaaaaccctgacacagacactgagtgaaaaatcgcgtgcatttgccgatatcgtcaaaatcggtcgaacccacttgcaggacgccacgccgctaacactagggcaggagatttccggctgggtagcgatgctcgagcataatctcaaacatatcgaatacagcctgcctcacgtagcggaactggc

SEQ ID NO: 520 - DNA, 469 bp, Escherichia coli
cgagcgccattcggcaggcggcggatgaagtactggcaggacagcatgacgacgaattcccgctggctatctggcagaccggctccggcacgcaaagtaacatgaacatgaacgaagtgttggctaaccgggccagtgaattactcggcggcgtgcgcgggatggaacgtaaagttcaccctaacgacgacgtgaacaaaagccaaagttccaacgatgtctttccgacggcgatgcacgttgcggcactactggcgctgcgcaagcaactcattccacaacttaaaaccctgacccagacgctgagtgaaaaatcccgcgcatttgccgatatcgtcaaaatcggtcgtacccacttgcaggacgcgacgccgttaacgctggggcaggagatttccggctgggtagcgatgctggagcataatttcaaacatatcgaatacagcctgcctcacgtagcggaactggc

SEQ ID NO: 521 - DNA, 469 bp, Escherichia coli
cgagcgccattcgtcaggcggcggatgaagtactggcaggacagcatgacgacgaattcccgctggctatctggcagaccggctccggcacgcaaagtaacatgaacatgaacgaagtgctggctaaccgggccagtgaattactcggcggtgtgcgcgggatggaacgtaaagttcaccctaacgacgacgtgaacaaaagccaaagttccaacgatgtctttccgacggctatgcacgttgcggcgctgctggcgctgcgcaagcaactcattcctcagcttaaaaccctgacacagacactgaatgagaaatcccgtgcttttgccgatatcgtcaaaattggtcgtactcacttgcaggatgccacgccgttaacgctggggcaggagatttccggctgggtagcgatgctcgagcataatctcaaacatatcgaatacagcctgcctcacgtagcggaactggc

SEQ ID NO: 522 - DNA, 469 bp, Escherichia coli
cgagcgccattcgtcaggcggcggatgaagtactggcaggacagcatgacgacgaattcccattggctatctggcagaccggctccggcacgcaaagtaacatgaacatgaacgaagtgctggctaaccgggccagtgaattactcggcggcgtgcgtgggatggagcgtaaagttcaccctaacgacgacgtgaacaaaagccaaagttctaacgatgtctttccaacggcgatgcacgttgcggcgctgctggcgctgcgcaagcaactcattccgcagcttaaaaccctgacacagacgctgagtgaaaaatcgcgtgcatttgccgatatcgtaaaaatcggtcgaacccacttgcaggacgccacgccgctaacactggggcaggagatttccggctgggtagcgatgctcgagcataatctcaaacatattgaatacagcctgcctcacgtagcggaactggc

SEQ ID NO: 523 - DNA, 469 bp, Escherichia coli
cgagcgccattcggcaggcggcggatgaagtactggcaggacagcatgacgacgaattcccgctggctatctggcagaccggctccggcacgcaaagtaacatgaacatgaacgaagtgctggctaaccgggccagtgaattactcggcggcgtgcgcgggatggaacgtaaagttcaccctaacgacgacgtgaacaaaagtcaaagttccaacgatgtctttccgacggcgatgcacgttgcggcgctgctggcgctgcgcaagcaactcattccgcagcttaaaaccctgacacagacactgagtgaaaaatcgcgtgcatttgccgatatcgtcaaaatcggtcgaacccacttgcaggacgccacgccgctaacactagggcaggagatttccggctgggtagcgatgctcgagcataatctcaaacatatcgaatacagcctgcctcacgtagcggaactggc

SEQ ID NO: 524 - DNA, 469 bp, Escherichia coli
cgagcgccattcggcaggcggcggatgaagtactggcaggacagcatgacgacgaattcccgctggctatctggcagaccggctccagcacgcaaagtaacatgaacatgaacgaagtgctggctaaccgggccagtgaattactcggcggcgtgcgcgggatggaacgtaaagttcaccctaacgacgacgtgaacaaaagccaaagttccaacgatgtctttccgacggcgatgcacgttgcggcgctgctggcgctgcgcaagcaactcattccacaacttaaaaccctgacccagacgctgagtgaaaaatcccgcgcatttgccgatatcgtcaaaatcggtcgtacccacttgcaggacgccacgccgttaacgctggggcaggagatttccggctgggtagcgatgctggagcataatctcaaacatatcgaatacagcctgcctcacgtagcggaactggc

SEQ ID NO: 525 - DNA, 469 bp, Escherichia coli
cgagcgccattcagcaggcggcggatgaagtactggcaggacagcatgacgacgaattcccgctggctatctggcagaccggctccggcacgcaaagtaacatgaacatgaacgaagtgttggctaaccgggccagtgaattactcggcggcgtgcgcgggatggaacgtaaagttcaccctaacgacgacgtgaacaaaagccaaagttccaacgatgtctttccgacggcgatgcacgttgcggcactactggcgctgcgcaagcaactcattccacaacttaaaaccctgacccagacgctgagtgaaaaatcccgcgcatttgccgatatcgtcaaaatcggtcgtacccacttgcaggacgcgacgccgttaacgctggggcaggagatttccggctgggtagcgatgctggagcataatctcaaacatatcgaatacagcctgcctcacgtagcggaactggc

SEQ ID NO: 526 - DNA, 469 bp, Escherichia coli
cgagagccattcgccaggcggcggatgaagtgctggcaggacaacatgatgatgagttcccgctggcaatctggcaaacgggatccggtacgcaaagcaatatgaatatgaatgaagtactggctaaccgggccagcgaattgcttggcggcgtacgcggaatggaacgtaaagttcaccctaacgatgacgtgaacaaaagccaaagctccaatgatgtcttcccaactgctatgcacgtagcggcgttattggcactgcgtaagcaactcattcctcagctcaaaaacctcactcaaactctgaatgagaaatcgcgcgcatttgccgatatcgtcaaaattggtcgtacccacttgcaggacgccacaccgctgaccctgggacaggagatttctggttgggtagcgatgctggagcataatctcaaacatattgaatacagcctgcctcacgtagcggaactggc

SEQ ID NO: 527 - DNA, 469 bp, Escherichia coli
cgagcgccattcggcaggcggcggatgaagtactggcaggacagcatgacgacgaattcccgctggctatctggcagaccggctccggcacgcaaagtaacatgaacatgaacgaagtgctggctaaccgggccagtgaattactcggcggcgtgcgcgggatggaacgtaaagttcaccctaacgacgacgtgaacaaaagccaaagttccaacgatctctttccgacggcgatgcacgttgcggcgctgctggcgctgcgcaagcaactcattccgcagcttaaaaccctgacacagacgctgagtgaaaaatcgcgtgcatttgccgatatcgtcaaaatcggtcgaacccacttgcaggacgccacgccgctaacactagggcaggagatttccggctgggtagcgatgctcgagcataatctcaaacatatcgaatacagcctgcctcacgtagcggaactggc

SEQ ID NO: 528 - DNA, 469 bp, Escherichia coli
cgagcgccattcggcaggcggcggatgaagtactggcaggacagcatgacgacgaattcccgcttgctatctggcagaccggctccggcacgcaaagtaacatgaacatgaacgaagtgctggctaaccgggccagtgaattactcggcggcgtgcgtgggatggagcgtaaagttcaccctaacgacgacgtgaacaaaagccaaagttctaacgatgtctttccaacggcgatgcacgttgcggcgctgctggcgctgcgcaagcaactcattccgcagcttaaaaccctgacacagacgctgagtgaaaaatcccgtgcatttgccgatatcgtaaaaatcggtcgaacccacttgcaggacgccacgccgctaacactgggacaggagatttccggctgggtagcgatgctcgagcataatctcaaacatattgaatacagcctgcctcacgtagcggaactggc

SEQ ID NO: 529 - DNA, 469 bp, Escherichia coli
cgagcgccattcgtcaggcggcggatgaagtactggcaggacagcatgacgatgaattcccgctggcaatctggcagaccggctccggcacgcaaagtaatatgaacatgaacgaagtgctggctaatcgggccagtgaattacttggcggcgtgcgcgggatggaacgtaaagttcaccctaacgacgacgtgaacaaaagccaaagttccaacgatgtctttccgacggcgatgcacgttgcggcgctgctggcgctgcgcaagcaactcattccgcagcttaaaaccctgacacagacactgagtgaaaaatcacgtgcatttgccgatatcgtaaaaatcggtcgaacccacttgcaggacgccacgccgctaacactggggcaggagatttccggctgggtagcgatgctcgagcataatctcaaacatatcgaatacagcctgcctcacgtagcggaactggc

SEQ ID NO: 530 - DNA, 469 bp, Escherichia coli
cgagcgccattcggcaggcggcggatgaagtactggcaggacagcatgacgacgaattcccgctggctatctggcagaccggctccggcacgcaaagtaacatgaacatgaacgaagtgctggctaaccgggccagtgaattactcggtggcgtgcgcgggatggaacgtaaagttcaccctaacgacgacgtgaacaaaagccaaagttccaacgatgtctttccgacggcgatgcacgttgcggcactactggcgctgcgcaagcaactcattccacaacttaaaaccctgacccagacgctgagtgaaaaatcccgcgcatttgctgatatcgtcaaaatcggtcgtacccacttgcaggacgccacgccgttaacgctggggcaggagatttccggctgggtagcgatgctcgagcataatctcaaacatatcgaatacagcctgccgcatgtagcggaactggc

SEQ ID NO: 531 - DNA, 469 bp, Escherichia coli
cgagcgccattcggcaggcggcggatgaagtactggcaggacagcatgacgacgaattcccattggctatctggcagactggctccggcacgcaaagtaacatgaacatgaacgaagtgctggctaaccgggccagtgaattactcggcggcgtgcgtgggatggagcgtaaagttcaccctaacgacgacgtgaacaaaagccaaagttctaacgatgtctttccaacggcgatgcacgttgcggcgctgctggcgctgcgcaagcaactcattccgcagcttaaaaccctgacacagacgctgagtgaaaaatcgcgtgcatttgccgatatcgtaaaaatcggtcgaacccacttgcaggacgccacgccgctaacactggggcaggagatttccggctgggtagcgatgctcgagcataatctcaaacatattgaatacagccagcctcacgtagcggaactggc

SEQ ID NO: 532 - DNA, 469 bp, Escherichia coli
cgagcgccattcggcaggcggcggatgaagtactggcaggacagcatgacgacgaattcccgctggctatctggcagaccggctccggcacgcaaagtaacatgaacatgaacgaagtgctggctaaccgggccagtgaattactcggcggcgtgcgcgggatggaacgtaaagttcaccctaacgacgacgtgaacaaaagccaaagttccaacgatgtctttccgacggcgatgcacgttgcggcgctgctggcgctgtgcaagcaactcattccacaacttaaaaccctgacccagacgctgagtgaaaaatcccgcgcatttgccgatatcgtcaaaatcggtcgtacccacttgcaggacgccacgccgttaacgctggggcaggagatttccggctgggtagcgatgctggagcataatctcaaacatatcgaatacagcctgcctcacgtagcggaactggc

SEQ ID NO: 533 - DNA, 469 bp, Escherichia coli
cgagagccattcgccaggcggcggatgaagtgctggcagggcaacatgatgatgagttcccgctggcaatctggcaaacgggatccggtacgcaaagcaatatgaatatgaatgaagtactggctaatcgggccagcgaattgcttggcggcgtacgcggaatggaacgtaaagttcaccctaacgatgacgtgaacaaaagccaaagctccaatgatgtcttcccaactgctatgcacgtggcggcgttattggcactgcgtaagcaactcattcctcagctcaaaaacctcactcaaactctgaatgagaaatcgcgcgcatttgccgatatcgtcaaaattggtcgtacccacttgcaggacgccacaccgctgaccctgggacaggagatttctggttgggtagcgatgctggagcataatctcaaacatattgaatacagcctgcctcacgtagcggaactggc

SEQ ID NO: 534 - DNA, 469 bp, Escherichia coli
cgagcgccattaggcaggcggcggatgaagtactggcaggacagcatgacgacgaattcccattggctatctggcagaccggctccggcacgcaaagtaacatgaacatgaacgaagtgctggctaaccgggccagtgaattactcggcggcgtgcgtgggatggagcgtaaagttcaccctaacgacgacgtgaacaaaagccaaagttctaacgatgtctttccaacggcgatgcacgttgcggcgctgctggcgctgcgcaagcaactcattccgcagcttaaaaccctgacacagacgctgagtgaaaaatcccgtgcatttgccgatatcgtaaaaatcggtcgaacccacttgcaggacgccacgccgcttacactggggcaggagatttccggctgggtagcgatgcttgagcataatctcaaacatattgaatacagcctgcctcacgtagcggaactggc

SEQ ID NO: 535 - DNA, 469 bp, Escherichia coli
cgagcgccattcggcaggcggcggatgaagtactggcaggacagcatgacgacgaattcccgctggctatctggcagaccggctccggcacgcaaagtaacatgaacatgaacgaagtgctggctaaccgggccagtgaattactcggcggcgtgcgcgggatggaacgtaaagttcaccctaacgacgacgtgaacaaaagccaaagttccaacgatgtctttccgacggcgatgcacgttgcggcgctgctggcgctgcgcaagcaactcattccgcagcttaaaaccctgacacagacgctgagtgaaaaatcgcgtgcatttgccgatatcgtaaaaatcggtcgaacccacttgcaggacgccacgccgctaacactggggcaggagatttccggctgggtggcgatgctcgagcataatctcaaacatatcgaatacagcctgcctcacgtagcggaactggc

SEQ ID NO: 536 - DNA, 469 bp, Escherichia coli
cgagcgccattcggcaggcggcggatgaagtactggcaggacagcatgacgacgaattcccgctggctatctggcagaccggctccggcacgcaaagtaacatgaacatgaacgaagtgttggctaaccgggccagtgaattactcggcggcgtgcgcgggatggaacgtaaagttcaccctaacgacgacgtgaacaaaagccaaagttccaacgatgtctttccgacggcgatgcacgttgcggcactactggcgctgcgcaagcaactcattccacaacttaaaaccctgacccagacgctgagtgaaaaatcccgcgcatttgccgatatcgtcaaaatcggtcgtacccacttgcaggacgcgacgccgttaacactggggcaggagatttccggctgggtagcgatgctggagcataatctcaaacatatcgaatacagcctgcctcacgtagcggaactggc

SEQ ID NO: 537 - DNA, 469 bp, Escherichia coli
cgagcgccattcgtcaggcggcggatgaagtattggcaggacagcatgacgatgaattcccgctggcaatctggcagaccggctccggcacgcaaagtaatatgaacatgaatgaagtgctggctaatcgggccagtgaattacttggcggcgtgcgcgggatggagcgtaaagttcaccctaacgacgacgtgaacaaaagccaaagttccaatgatgtctttccgacggcgatgcacgttgcggcgctgctggcgctgcgcaagcaacttattccgcagcttaaaaccctgacacagacgctgaatgagaaatcgcacgcatttgccgatatcgtcaaaattggtcgtacccacttgcaggatgccacgccgctaacactggggcaggagatttccggctgggtagcgatgctggagcataatctcaaacatatcgaatacagcctgccgcatgtagcggaactggc

SEQ ID NO: 538 - DNA, 469 bp, Escherichia coli
cgagcgccattcggcaggcggcggatgaagtactggcaggacagcatgacgacgaattcccgctggctatctggcagactggctccggcacgcaaagtaacatgaacatgaacgaagtgctggctaaccgggccagtgaattactcggcggcgtgcgcgggatggaacgtaaagttcaccctaacgacgacgtgaacaaaagccaaagttccaacgatgtctttccgacggcgatgcacgttgcggcgctgctggcgctgcgcaagcaactcattccgcagcttaaaaccctgacacagacgctgagtgaaaaatcgcgtgcatttgccgatatcgtaaaaatcggtcgaacccacttgcaggacgccacgccgctaacactggggcaggagatttccggctgggtagcgatgctcgagcataatctcaaacatatcgaatacagcctgcctcacgtagcggaactggc

SEQ ID NO: 539 - DNA, 469 bp, Escherichia coli
cgagcgccattcggcaggcggcggatgaagtactggcaggacagcatgacgacgaattcccgctggctatctggcagaccggctccggcacgcaaagtaacatgaacatgaacgaagtgctggctaaccgggccagtgaattactcggcggcgtgcgcgggatggaacgtaaagttcaccctaacgacgacgtgaacaaaagccaaagttccaacgatgtctttccgacggcgatgcacgttgcggcgctgctggcgctgcgcaagcaactcattccgcagcttaaaaccctgacacagacgctgagtgaaaaatcccgtgcatttgccgatatcgtcaaaatcggtcgaacccacttgcaggacgccacgccgctaacactggggcaggagatttccggctgggtagcgatgctcgagcataatctcaaacatatcgaatacagcctgcctcacgtagcggaactggc

SEQ ID NO: 540 - DNA, 469 bp, Escherichia coli
cgagcgccattcggcaggcggcggatgaagtactggcaggacagcatgacgacgaattcccgctggctatctggcagaccggctccggcacgcaaagtaacatgaacatgaacgaagtgctggctaaccgggccagtgaattactcggcggcgtgcgcgggatggaacgtaaagttcaccctaacgacgacgtgaacaaaagccaaagttccaacgatgtctttccgacggcgatgcacgttgcggctctgctggcgctgcgcaagcaactcattccgcagcttaaaaccctgacacagacactgagtgaaaaatcgcgtgcatttgccgatatcgtcaaaatcggtcgaacccacttgcaggacgccacgccgctaacactagggcaggagatttccggctgggtagcgatgctcgagcataatctcaaacatatcgaatacagcctgcctcacgtagcggaactggc

SEQ ID NO: 541 - DNA, 469 bp, Escherichia coli; identical to SEQ ID NO: 540

SEQ ID NO: 542 - DNA, 469 bp, Escherichia coli
cgagcgccattcggcaggcggcggatgaagtactggcaggacagcatgacgacgaattcccgctggctatctggcagaccggctccggcacgcaaagtaacatgaacatgaacgaagtgctggctaaccgggccagtgaattactcggcggcgtgcgcgggatggaacgtaaagttcaccctaacgacgacgtgaacaaaagccaaagttccaacgatgtctttccgacggcgatgcacgttgcggcgctgctggcgctgcgcaagcaactcattccgcagcttaaaaccctgacacagacactgagtgaaaaatcgcgtgcatttgccgatatcgtcaaaatcggtcgaacccacttgcaggacgccacgccggtaacactagggcaggagatttccggctgggtagcgatgctcgagcataatctcaaacatatcgaatacagcctgcctcacgtagcggaactggc

SEQ ID NO: 543 - DNA, 469 bp, Escherichia coli
cgagcgccattcgtcaggcggcggatgaagtactggcaggacagcatgacgacgaattcccgctggctatctggcagaccggctccggcacgcaaagtaacatgaacatgaacgaagtgctggctaaccgggccagtgaattactcggcggtgtgcgcgggatggaacgtaaagttcaccctaacgacgacgtgaacaaaagccaaagttccaacgatgtctttccgacggcgatgcacgttgcggcgctgctggtgctgcgcaagcaactcattccgcagcttaaaaccctgacacagacgctgagtgaaaaatcgcgtgcatttgccgatatcgtaaaaatcggtcgaacccacttgcaggacgccaccccgctaacactggggcaggagatttccggctgggtagcgatgctcgagcataatctcaaacatatcgaatacagcctgcctcacgtagcggaactggc

SEQ ID NO: 544 - DNA, 469 bp, Escherichia coli
cgagcgccattcggcaggcggcggatgaagtactggcaggacagcatgacgacgaattcccgctggctatctggcagaccggctccggcacgcaaagtaacatgaacatgaacgaagtgctggctaaccgggccagtgaattactcggcggcgtgcgcgggatggaacgtaaagttcaccctaacgacgacgtgaacaaaagccaaagttccaacgatgtctttccgacggcgatgcacgttgcggcgctgctggcgctgcgcaagcaactcattccgcagcttaaaaccctgacacagacgctgagtgaaaaatcgcgtgcatttgccgatatcgtcaaaatcggtcgaacccacttgcaggacgccacgccgctaacactggggcaggagatttccggctgggtagcgatgctcgagtataatctcaaacatatcgaatacaccctgcctcacgtagcggaactggc

SEQ ID NO: 545 - DNA, 469 bp, Escherichia coli
cgagcgccattcgtcaggcggcggatgaagtactggcaggacagcatgacgacgaattcccgctggctatctggcagaccggctccggtacgcaaagtaacatgaacatgaacgaagtgctggctaaccgggccagtgaattactcagcggtgtgcgcgggatggaacgtaaagttcaccctaacgacgacgtgaacaaaagccaaagttccaacgatgtctttccgacggcgatgcacgttgcggcgctgctggcgctgcgcaagcaactcattcctcagcttaaaaccctgacacagacactgaatgagaaatcccgtgcttttgccgatatcgtcaaaattggtcgtactcacttgcaggatgccacgccgttaacgctggggcaggagatttccggctgggtagcgatgctcgagcataatctcaaacatatcgaatacagcctgcctcacgtagcggaactggc

SEQ ID NO: 546 - DNA, 469 bp, Escherichia coli
cgagcgccattcggcaggcggcggatgaagtactggcaggacagcatgacgacgaattcccattggctatctggcagactggctccggcacgcaaagtaacatgaacatgaacgaagtgctggctaaccgggccagtgaattactcggcggcgtgcgtgggatggagcgtaaagttcaccctaacgacgacgtgaacaaaagccaaagttctaacgatgtctttccaacggcgatgcacgttgcggcgctgctgacgctgcgcaagcaactcattccgcagcttaaaaccctgacacagacgctgagtgaaaaatcgcgtgcatttgccgatatcgtaaaaatcggtcgaacccacttgcaggacgccacgccgctaacactggggcaggagatttccggctgggtagcgatgctcgagcataatctcaaacatattgaatacagcctgcctcacgtagcggaactggc

SEQ ID NO: 547 - DNA, 469 bp, Escherichia coli
cgagcgccattcggcaggcggcggatgaagtactggcaggacagcatgacgacgaattcccgctggctatctggcagaccggctccggcacgcaaagtaacatgaacatgaacgaagtgctggctaaccgggccagtgaattactcggcggcgtgcgcgggatggaacgtaaagttcaccctaacgacgacgtgaacaaaagccaaagttccaacgatgtctttccgacggcgatgcacgttgcggcgctgctggcgctgcgcaagcaactcattccgcagcttaaaaccctgacacagacactgagtgaaaaatcgcgtgcatttgccgatatcgtcaaaatcggtcgaacccacttgcaggacgccacgccgctaacactagggcaggagatttccggctgggtagcgatgttcgagcataatctcaaacatatcgaatacagcctgcctcacgtagcggaactggc

SEQ ID NO: 548 - DNA, 469 bp, Escherichia coli
cgagcgccattcgtcaggcggcggatgaagtactggcaggacagcatgacgacgaattcccgctggctatctggcagaccggctccggcacgcaaagtaacatgaacatgaacgaagtgctggctaaccgggccagtgaattactcggcggtgtgcgcgggatggaacgtaaagtttaccctaacgacgacgtgaacaaaagccaaagttccaacgatgtctttccgacggcgatgcacgttgcggcgctgctggcgctgcgcaagcaactcattcctcagcttaaaaccctgacacagacactgaatgagaaatcccgtgcttttgccgatatcgtcaaaattggtcgtactcacttgcaggatgccacgccgttaacgctggggcaggagatttccggctggatagcgatgctcgagcataatctcaaacatatcgaatacagcctgcctcacgtagcggaactggc

SEQ ID NO: 549 - DNA, 469 bp, Escherichia coli
cgagcgccattcgtcaggcggcggatgaagtactggcaggacagcatgacgacgaattcccgctggctatctggcagaccggctccggcacgcaaagtaacatgaacatgaacgaagtgctggctaaccgggccagtgaattactcggcggtgtgcgcgggatggaacgtaaagttcaccctaacgacgacgtgaacaaaagccaaagttccaacgatgtctttccgacggcgatgcacgttgcggcgctgctggcgctgcgcaaccaactcattcctcagcttaaaaccctgacacagacactgaatgagaaatcccgtgcttttgccgatatcgtcaaaattggtcgtactcacttgcaggatgccacgccgttaacgctggggcaggagatttccggctgggtagcgatgctcgagcataatctcaaacatatcgaatacagcctgcctcacgtagcggaactggc

SEQ ID NO: 550 - DNA, 469 bp, Escherichia coli
cgagcgccattcggcaggcggcggatgaagtactggcaggacagcatgacgacgaattcccgctggctatctggcagaccggctccggcacgcaaagtaacatgaacatgaacgaagtgctggctaaccgggccagtgaattactcggcggcgtgcgcgggatggaacgtaaagttcaccctaacgacgacgtgaacaaaagccaaagttccaacgatgtctttccgacggcgatgcacgttgcggcgctgctggcgctgcgcaagcaactcatttcgcagcttaaaaccctgacacagacgctgagtgaaaaatcgcgtgcatttgccgatatcgtcaaaatcggtcgaacccacttgcaggacgccacgccgctaacactggggcaggagatttccggctgggtagcgatgctcgagtataatctcaaacatatcgaatacagcctgcctcacgtagcggaactggc

SEQ ID NO: 551 - DNA, 469 bp, Escherichia coli
cgagcgccattcggcaggcggcggatgaagtactggcaggacagcatgacgacgaattcccgctggctatctggcagaccggctccggcacgcaaagtaatatgaacatgaatgaagtgctggctaaccgggccagtgaattacttggcggcgtgcgcgggatggagcgtaaagttcatcctaacgacgacgtgaacaaaagccaaagttccaatgatgtctttccgacggcgatgcacgttgcggcgctgctggcgctgcgcaagcaactcattccgcagcttaaatccctgacacagacgctgagtgaaaaatcgcgcgcatttgccgatatcgtcaaaatcggtcgaacccacttgcaggatgccacgccgctaacactagggcaggagatttccggctgggtagcgatgctggagcataatctcaaacatatcgaatacagcctgcctcacgtagcggaactggc

SEQ ID NO: 552 - DNA, 469 bp, Escherichia coli
cgagcgccattcggcaggcggcggatgaagtactggcaggacagcatgacgacgaattcccgctggctatctggcagaccggctccggcacgcaaagtaacatgaacatgaacgaagtgctggctaaccgggccagtgaattactcggcggcgtgcgcgggatggaacgtaaagttcaccctaacgacgacgtgaacaaaagccaaagttccaacgatgtctttccgacggcgatgcacgttgcggcgctgctggcgctgcgcaagcaactcattccgcagcttaaaaccctgacacagacactgagtgaaaaatcgcgtgcatttgccgatatcgtcaaaatcggtcgaacccacttgcaggacgccacgccgctaacactagggcaggagatttccggctgggtagcgatgctcgagcataatctcaaacatatcgaatacagcctgcctcacgtagcgaaactggc

SEQ ID NO: 553 - DNA, 469 bp, Escherichia coli
cgagcgccattcgtcaggcggcggatgaagtactggcaggacagcatgacgacgaattcccgctggctatctggcagaccggctccggcacgcaaagtaacatgaacatgaacgaagtgctggctaaccgggccagtgaattactcggcggtgtgcgcgggatggaacgtaaagttcaccctaacgacgacgtgaacaaaagccaaagttccaacgacgtctttccgacggcgatgcacgttgcggcgctgctggcgctgcgcaagcaactcattcctcagcttaaaaccctgacacagacactgaatgagaaatcccgtgcttttgccgatatcgtcaaaattggtcgtactcacttgcaggatgccacgccgttaacgctggggcaggagatttccggctgggtagcgatgctcgagcataatctcaaacatatcgaatacagcctgcctcacgtagcggaactggc

SEQ ID NO: 554 - DNA, 469 bp, Escherichia coli
cgagcgccattcggcaggcggcggatgaagtactggcaggacagcatgacgacgaattcccgctggctatctggcagaccggctccggcacgcaaagtaacatgaacatgaacgaagtgctggctaaccgggccagtgaattactcggcggcgtgcgcgggatggaacgtaaagttcaccctaacgacgacgtgaacaaaagccaaagttccaacgatgtctttccgacggcgatgcacgttgcggcgctgctggcgctgcgcaagcaactcattccgcagcttaaaaccctgacacaggcactgagtgaaaaatcgcgtgcatttgccgatatcgtcaaaatcggtcgaacccacttgcaggacgccacgccgctaacactagggcaggagatttccggctgggtagcgatgctcgagcataatctcaaacatatcgaatacagcctgcctcacgtagcggaactggc

SEQ ID NO: 555 - DNA, 469 bp, Escherichia coli
cgagcgccattcggcaggcggcggatgaagtactggcaggacagcatgacgacgaattcccgctggctatctggcagaccggctccggcacgcaaagtaacatgaacatgaacgaagtgctggctaaccgggccagtgaattactcggcggcgtgcgcgggatggaacgtaaagttcaccctaacgacgacgtgaacaaaagccaaagttccaacgatgtctttccgacggcgatgcacgttgcggcgctgctggcgctgcgcaagcaactcattcctcagcttaaaaccctgacacagacgctgagtgagaaatcccgtgcatttgccgatatcgtcaaaattggtcgtactcacttgcaggatgccacgccgttaacactggggcaggagatttccggctgggtagcgatgctcgagcataatctcaaacatatcgaatacagcctgcctcacgtagcggaactggc

SEQ ID NO: 556 - DNA, 469 bp, Escherichia coli
cgagcgccattcggcaggcggcggatgaagtactggcaggacagcatgacgacgaattcccgctggctatctggcagaccggctccggcacgcaaagtaacatgaacatgaacgaagtgttggctaaccgggccagtgaattactcggcggcgtgcgcgggatggaacgtaaagttcaccctaacgacgacgtgaacaaaagccaaagttccaacgatgtctttccgacggcgatgcacgttgcggcactactggtgctgcgcaagcaactcattccacaacttaaaaccctgacccagacgctgagtgaaaaatcccgcgcatttgccgatatcgtcaaaatcggtcgtacccacttgcaggacgcgacgccgttaacactggggcaggagatttccggctgggtagcgatgctggagcataatctcaaacatatcgaatacagcctgcctcacgtaacggaactggc

SEQ ID NO: 557 - DNA, 469 bp, Escherichia coli
cgagcgccattcggcaggcggcggatgaagtactggcaggacagcatgacgacgaattcccgctggcaatctggcagaccggctccggcacgcaaagtaacatgaacatgaacgaagtgctggctaaccgggccagtgaattactcggcggcgtgcgcgggatggaacgtaaagttcaccctaacgacgacgtgaacaaaagccaaagttccaacgatgtctttccgacggcgatgcacgttgcggcgctgctagcgctgcgcaagcaactcattccgcagcttaaaagcctgacacagacgctgaatgagaaatcgcgcgcatttgccgatatcgtcaaaattggtcgtacccacttgcaggatgccacgccgctaacactggggcaggagatttccggctgggtagcgatgctggagcataatctcaaacatatcgaatacagcctgccgcatgtagcggaactggc

SEQ ID NO: 558 - DNA, 469 bp, Escherichia coli
cgagcgccattcggcaggcggcggatgaagtactggcaggacagcatgacgacgaattcccgctggcaatctggcagaccggctccggcacgcaaagtaacatgaacatgaacgaagtgctggctaaccgggtcagtgaattactcggcggcgtgcgcgggatggaacgtaaagttcaccctaacgacgacgtgaacaaaagccaaagttccaacgatgtctttccgacggcgatgcacgttgcggcgctgctagcgctgcgcaagcaactcattccgcagcttaaaaccctgacacagacgctgaatgagaaatcgcgcgcatttgccgatatcgtcaaaattggtcgtacccacttgcaggatgccacgccgctaacactggggcaggagatttccggctgggtagcgatgctggagcataatctcaaacatatcgaatacagcctgccgcatgtagcggaactggc

SEQ ID NO: 559 - DNA, 469 bp, Escherichia coli
cgagcgccattcggcaggcggcggatgaagtactggcaggacagcatgacgacgaattcccgctggcaatctggcagaccggctccggcacgcaaagtaacatgaacatgaacgaagtgctggctaaccgggccagtgaattactcggcggcgtgcgtgggatggagcgtaaagttcaccctaacgacgacgtgaacaaaagccaaagttctaacgatgtctttccaacggcgatgcacgttgcggcgctgctggcgctgcgcaagcaactcattccgcagcttaaaaccctgacacagacgctgagtgaaaaatcgcgtgcatttgccgatatcgtaaaaatcggtcgaacccacttgcaggacgccacgccgctaacactggggcaggagatttccggctgggtagcgatgctcgagcataatctcaaacatattgaatacagcctgcctcacgtagcggaactggc

SEQ ID NO: 560 - DNA, 469 bp, Escherichia coli
cgagcgccattcggcaggcggcggatgaagtactggcaggacagcatgacgacgaattcccgcttgctatctggcagaccggctccggcacgcaaagtaacatgaacatgaacgaagtgctggctaaccgggccagtgaattactcggcggcgtgcgtgggatggagcgtaaagttcaccctaacgacgacgtgaacaaaagccaaagttctaacgatgtctttccaacggcgatgcacgttgctgcgctgctggcgctgcgcaagcaactcattccgcagcttaaaaccctgacacagacgctgagtgaaaaatcccgtgcatttgccgatatcgtaaaaatcggtcgaacccacttgcaggacgccacgccgctaacactgggacaggagatttccggctgggtagcgatgctcgagcataatctcaaacatattgaatacagcctgcctcacgtagcggaactggc

SEQ ID NO: 561 - DNA, 469 bp, Escherichia coli
cgagcgccattcggcaggcggcggatgaagtactggcaggacagcatgacgacgaattcccgctggctatctggcagaccggctccggcacgcaaagtaacatgaacatgaacgaagtgctggctaaccgggccagtgaattactcggcggtgtgcgcgggatggaacgtaaagttcaccctaacgacgacgtgaacaaaagccaaagttccaacgatgtctttccgacggcgatgcacgttgcggtgctgctggcactgcgcaagcaactcattccgcagcttaaaaccctgacacagacgctgagtgaaaaatcgcgtgcatttgccgatatcgtcaaaatcggtcgaacccacttgcaggacgccacgccgctaacactagggcaggagatttccggctgggtagcgatgctcgagcataatctcaaacatatcgaatacagcctgcctcacgtagcggaactggc

SEQ ID NO: 562 - DNA, 469 bp, Escherichia coli
cgagcgccattcggcaggcggcggatgaagtactggcaggacagcatgacgacgaattcccgctggctatctggcagaccggctccggcacgcaaagtaacatgaacatgaacgaagtgctggctaaccgggccagtgaattactcggtggcgtgcgcgggatggaacgtaaagttcaccctaacgacgacgtgaacaaaagccaaagttccaacgatgtctttccgacggcgatgcacgttgcggcgctgctggcgctgcgcaagcaactcattccacaacttaaaaccctgacccagacgctgagtgaaaaatcccgcgcatttgccgatatcgtcaaaatcggtcgtacccacttgcaggacgccacgccgttaacgctggggcaggagatttccggctgggtagcgatgctggagcataatctcaaacatatcgaatacagcctgcctcacgtagcggaactggc

SEQ ID NO: 563 - DNA, 469 bp, Escherichia coli
cgagcgccattcgtcaggcggcggatgaagtactggcaggacagcatgacgacgaattcccgctggctatctggcagaccggctccggcacgcaaagtaacatgaacatgaacgaagtgctggctaaccgggccagtgaattactcggcggtgtgcgcgggatggaacgtaaagttcaccctaacgatgacgtgaacaaaagccaaagttccaacgatgtctttccgacggcgatgcacgttgcggcgctgctggcgctgcgcaagcaactcattccgcagcttaaacccctgacacagacgctgagtgaaaaatcgcgtgcatttgccgatatcgtcaaaattggtcgtactcacttgcaggatgccacgccgttaacactggggcaggagatttccggctgggtagcgatgctcgagcataatctcaaacatatcgaatacagcctgcctcacgtagcggaactggc

SEQ ID NO: 564 - DNA, 475 bp, Escherichia coli
cgagcgccattcggcaggcggcggatgaagtactggcaggacagcatgacgacgaattcccgctggctatctggcagaccggctccggcacgcaaagtaacatgaacatgaacatgaacgaagtgctggctaaccgggccagtgaattactcggcggtgtgcgcgggatggaacgtaaagttcaccctaacgacgacgtgaacaaaagccaaagttccaacgatgtctttccgacggcgatgcacgttgcggcgctgctggcactgcgcaagcaactcattccgcagcttaaaaccctgacacagacgctgagtgaaaaatcgcgtgcatttgccgatatcgtcaaaatcggtcgaacccacttgcaggacgccacgccgctaacactagggcaggagatttccggctgggtagcgatgctcgagcataatctcaaacatatcgaatacagcctgcctcacgtagcggaactggc

SEQ ID NO: 565 - DNA, 469 bp, Escherichia coli
cgagcgccattcggcaggcggcggatgaagtactggcaggacagcatgacgacgaattcccgctggctatctggcagaccggctccggcacgcaaagtaacatgaacatgaacgaagtgctggctaaccgggccagtgaattactcggcggtgtgcgcgggatggaacgtaaagttcaccctaacgacgacgtgaacaaaagccaaagctccaacgatgtctttccgacggcgatgcacgttgcggcgctgctggcgctgcgcaagcaactcattccgcagcttaaaaccctgacacagacactgaatgagaaatcccgtgcatttgccgatatcgtcaaaattggtcgtactcacttgcaggacgccacgccgctaacactagggcaggagatttccggctgggtagcgatgctcgagcataatctcaaacatatcgaatacagcctgcctcacgtagcggaactggc

SEQ ID NO: 566 - DNA, 469 bp, Escherichia coli
cgagcgccattcggcaggcggcggatgaagtattggcaggacagcatgacgacgaattcccgctggcaatctggcagaccggctccggcacgcaaagtaatatgaacatgaacgaagtgctggctaaccgggccagtgaattactcggcggcgtgcgtgggatggagcgtaaagttcaccctaacgacgacgtgaacaaaagccaaagttccaatgatgtctttccgacggcgatgcacgttgcggcgctactggcgctgcgcaagcaactcattccacaacttaaaacgctgacacagacactgaatgagaaatcccgtgcatttaccgacatcgtcaaaattggtcgaactcacttgcaggatgccacgccgctaacactggggcaggagatttccggctgggtagcgatgctggagcataatctcaaacatatcgaatacagcctgccgcatgtagcggaactggc

SEQ ID NO: 567 - DNA, 469 bp, Escherichia coli
cgagcgccattcgtcaggcggcggatgaagtactggcaggacagcatgacgacgaattcccgctggctatctggcagaccggctccggcacgcaaagtaacatgaacatgaacgaagtgctggctaaccgggccagtgaattactcggcggtgtgcgcgggatggaacgtaaagttcaccctaacgacgacgtgaacaaaagccaaagttccaacgatgtctttccgacggcgatgcacgttgcggcgctgctggtgctgcgcaagcaactcattcctcagcttaaaaccctgacacagacactgaatgagaaatcccgtgcttttgccgatatcgtcaaaattggtcgtactcacttgcaggatgccacgccgttaacgctggggcaggagatttccggctgggtagcgatgctcgagcataatctcaaacatatcgaatacagcctgcctcacgtagcggaactggc

SEQ ID NO: 568 - DNA, 469 bp, Escherichia coli
cgagcgccattcgtcaggcggcggatgaagtactggcaggacagcatgacgacgaattcccgctggctatctggcagaccggctccggcacgcaaagtaacatgaacatgaacgaagtgctggctaaccgggccagtgaattactcggcggtgtgcgcgggatggaacgtaaagttcaccctaacgacgacgtgaacaaaagccaaagttccaacgatgtctttccgacggcgatgcacgttgcggcgctgctggcgctgcgcaagcaactcattccgcagcttaaaaccctgacacagacgctgagtgaaaaatcgcgtgcatttgccgatatcgtcaaaatcggtcgaacccacttgcaggacgccaccccgctaacactggggcaggagatttccggctgggtagcgatgctcgagcataatctcaaacatatcgaatacagcctgcctcacgtagcggaactggc

SEQ ID NO: 569 - DNA, 469 bp, Escherichia coli
cgagcgccattcggcaggcggcggatgaagtactggcaggacagcatgacgacgaattcccgctggctatctggcagaccggctccggcacgcaaagtaacatgaacatgaacgaagtgctggctaaccgggccagtgaattactcggcggcgtgcgcgggatggaacgtaaagttcaccctaacgacgacgtgaacaaaagccaaagttccaacgatgtctttccgacggcgatgcacgttgcggcgctgctggcgctgcgcaagcaactcattcggcagcttaaaaccctgacacagacactgagtgaaaaatcgcgtgcatttgccgatatcgtcaaaatcggtcgaacccacttgcaggacgccacgccgctaacactagggcaggagatttccggctgggtagcgatgctcgagcataatctcaaacatatcgaatacagcctgcctcacgtagcggaactggc

SEQ ID NO: 570 - DNA, 469 bp, Escherichia coli
cgagcgccattcgtcaggcggcggatgaagtactggcaggacagcatgacgacgaattcccgctggctatctggcagaccggctccggcacgcaaagtaacatgaacatgaacgaagtgctggctaaccgggccagtgaattactcggcggtgtgctcgggatggaacgtaaagttcaccctaacgacgacgtgaacaaaagccaaagttccaacgatgtctttccgacggcgatgcacgttgcggcgctgctggcgctgcgcaagcaactcattcctcagcttaaaaccctgacacagacactgaatgagaaatcccgtgcttttgccgatatcgtcaaaattggtcgtactcacttgcaggatgccacgccgttaacgctggggcaggagatttccggctgggtagcgatgctcgagcataatctcaaacatatcgaatacagcctgcctcacgtagcggaactggc

SEQ ID NO: 571 - DNA, 469 bp, Escherichia coli
cgagcgccattcgtcaggcggcggatgaagtactggcaggacagcatgacgatgaattcccgctggcaatctggcagaccggctccggcacgcaaagtaacatgaacatgaacgaagtgcttgctaaccgcgccagtgaattactcggcggcgtgcgtgggatggagcgtaaagttcaccctaacgacgacgtgaacaaaagccaaagttctaacgatgtctttccaacggcgatgcacgttgcggcgctgctggcgctgcgcaagcaactcattccgcagcttaaaaccctgacacagacactgaatgagaaatcccgtgcatttgccgatatcgtaaaaatcggtcgaacccacttgcaggacgccacgccgctaacactggggcaggagatttccggctgggtagcgatgctggagcataatctcaaacatattgaatacagcctgcctcacgtagcggaactggc

SEQ ID NO: 572 - DNA, 469 bp, Escherichia coli
cgagcgccattcggcaggcggcggatgaagtactggcaggacagcatgacgacgaattcccgctggctatctggcagaccggctccggcacgcaaagtaacatgaacatgaatgaagtgctggctaaccgggccagtgaattactcggcggcgtgcgcgggatggaacgtaaagttcaccctaacgacgacgtgaacaaaagccaaagttccaacgatgtctttccgacggcgatgcacgttgcggcactactggcgctgcgcaagcaactcattccacaacttaaaaccctgacccagacgctgagtgaaaaatcccgcgcatttgccgatatcgtcaaaatcggtcgtacccacttgcaggacgcgacgccgttaacgctggggcaggagatttccggctgggtagcgatgctggagcataatctcaaacatatcgaatacagccggcctcacgtagcggaactggc

SEQ ID NO: 573 - DNA, 469 bp, Escherichia coli
cgagcgccattcggcaggcggcggatgaagtactggcaggacagcatgacgacgaattcccgctggctatctggcagaccggctccggcacgcaaagtaacatgaacatgaacgaagtgctggctaaccgggccagtgaattactcggcggtgtgcgcgggatggaacgcaaagttcaccctaacgacgacgtgaacaaaagccaaagttccaacgatgtctttccgacggcgatgcacgttgcggcgctgctggcactgcgcaagcaactcattccgcagcttaaaaccctgacacagacgctgagtgaaaaatcgcgtgcatttgccgatatcgtcaaaatcggtcgaacccacttgcaggacgccacgccgctaacactagggcaggagatttccggctgggtagcgatgctcgagcataatctcaaacatatcgaatacagcctgcctcacgtagcggaactggc

SEQ ID NO: 574 - DNA, 469 bp, Escherichia coli
cgagcgccattcggcaggcggcggatgaagtactggcaggacagcatgacgacgaattcccgctggctatctggcagaccggctctggcacgcaaagtaacatgaacatgaacgaagtgctggctaaccgggccagtgaattactcggcggcgtgcgcgggatggaacgtaaagttcaccctaacgacgacgtgaacaaaagccaaagttccaacgatgtctttccgacggcgatgcacgttgcggcgctgctggcgctgcgcaagcaactcattccgcagcttaaaaccctgacacagacactgagtgaaaaatcgcgtgcatttgccgatatcgtcaaaatcggtcgaacccacttgcaggacgccacgccgctaacactagggcaggagatttccggctgggtagcgatgctcgagcataatctcaaacatatcgaatacagcctgcctcacgtagcggaactggc

SEQ ID NO: 575 - DNA, 469 bp, Escherichia coli
cgagcgccattcggcaggcggcggatgaagtactggcaggacagcatgacgacgaattcccgctggcaatctggcagaccggctccggcacgcaaagtaacatgaacatgaacgaagtgctggctaaccgggccagtgaattactcggcggcgtgcgtgggatggagcgtaaagttcaccctaacgacgacgtgaacaaaagccaaagttccaacgatgtctttccgacggcgatgcacgttgcggcgctgctggcgttgcgcaagcaactcattccgcagcttaaaaccctgacacagacgctgaatgagaaatcccgtacatttgccgatatcgtcaaaattggtcgtactcacttgcaggatgccacgccgttaacgctggggcaggagatttccggctgggtagcgatgctggagcataatctcaaacatattgaatacagcctgcctcacgtagcggaactggc

SEQ ID NO: 576 - DNA, 469 bp, Escherichia coli
cgagcgccattcggcaggcggcggatgaagtactggcaggacagcatgacgacgaattcccgctggctatctggcagaccggctccggcacgcaaagtaacatgaacatgaacgaagtgctgtctaaccgggccagtgaattactcggcggcgtgcgcgggatggaacgtaaagttcaccctaacgacgacgtgaacaaaagccaaagttccaacgatgtctttccgacggcgatgcacgttgcggcgctgctggcgctgcgcaagcaactcattccgcagcttaaaaccctgacacagacgctgagtgaaaaatcgcgtgcatttgccgatatcgtaaaaatcggtcgaacccacttgcaggacgccacgccgctaacactggggcaggagatttccggctgggtagcgatgctcgagcataatctcaaacatatcgaatacagcctgcctcacgtagcggaactggc

SEQ ID NO: 577 - DNA, 469 bp, Escherichia coli
cgatcgccattcgtcaggcggtggatgaagtactggcgggacagcatgacgatgaattcccgctggctatctggcagaccggttccggcacgcaaagtaacatgaacatgaacgaagtgctggctaaccgggccagtgaactactcggtggtgtgcgcgggatggaacgtaaagttcatcctaacgacgacgtgaacaaaagccaaagttccaatgatgtctttccgacggcgatgcacgttgcggcgctgctggcgctgcgcaagcaactcattccacaacttaaaaccctgacacaaactctgaatgagaaatcccgtgcatttgccgatatcgtcaaaattggtcgtacccacttgcaggatgccacgccgctaacactggggcaggagatttccggctgggtagcgatgctggagcataatctcaaacatattgaatacagcctgcctcacgtagctgaactggc

SEQ ID NO: 578 - DNA, 469 bp, Escherichia coli
cgagagccattcgccaggcggcggatgaagtgctggcaggacaacatgatgatgagttcccgctggcaatctggcaaacgggatccggtacgcaaagcaatatgaatatgaatgaagtactggctaaccgggccagcgaattgcttggcggcgtacgcggaatggaacgtaaagttcaccctaacgatgacgtgaacaaaagccaaagctccaatgatgtcttcccaactgctatgcacgtggcggcgttattggcactgcgtaagcaactcattcctcagctcaaaaacctcactcaaactctgaatgagaaatcgcgtacatttgccgatatcgtcaaaattggtcgtacccacttgcaggacgccacaccgctgaccctgggacaggagatttctggttgggtagcgatgctggagcataacctcaaacatattgaatacagcctgcctcacgtagcggaactggc

SEQ ID NO: 579 - DNA, 469 bp, Escherichia coli
cgagagccattcgccaggcggcggatgaagtgctggcagggcaacatgatgatgagttcccgctggcaatctggcaaacgggatccggtacgcaaagcaatatgaatatgaatgaagtactggctaatcgggccagcgaattgcttggcggcgtacgcggaatggaacgtaaagttcaccctaacgatgacgtgaacaaaagccaaagctccaatgatgtcttcccaactgctatgcacgtggcggcgttattggcactgcgtaagcaactcattcctcagctcaaaaacctcactcaaactctgaatgagaaatcgcgtgcatttgccgatatcgtcaaaattggtcgtacccacttgcaggacgccacaccgctgaccttgggacaggagatttctggttgggtagcgatgctggagcataatctcaaacatattgaatacagcctgcctcacgtagcggaactggc

SEQ ID NO: 580 - DNA, 469 bp, Escherichia coli
cgagcgccattcggcaggcggcggatgaagtactggcaggacagcatgacgacgaattcccgctggctatctggcagaccggctccggcacgcaaagtaacatgaacatgaacgaagtgctggctaaccgggccagtgaattactcggcggcgtgcgcgggatggagcgtaaagttcaccctaacgacgacgtgaacaaaagccaaagttccaacgatgtctttccgacggcgatgcacgttgcggcgctgctggcgctgcgcaagcaactcattccacaacttaaaaccctgacccagacgctgagtgaaaaatcccgcgcatttgccgatatcgttaaaatcggtcgtacccacttgcaggacgccacgccgttaacgctggggcaggagatttccggctgggtagcgatgctggagcataatctcaaacatatcgaatacagcctgcctcacgtagcggaactggc

SEQ ID NO: 581 - DNA, 469 bp, Escherichia coli
cgagcgccattcggcaggcggcggatgaagtactggcaggacagcatgacgacgaattcccgctggctatctggcagaccggctccggtacgcaaagtaacatgaatatgaacgaagtgctggctaaccgggccagtgaattactcggtggcgtgcgcgggatggaacgtaaagttcaccctaacgacgacgtgaacaaaagccaaagttccaacgatgtctttccgacggcgatgcacgttgcggcactactggcgctgcgcaagcaactcattccacaacttaaaaccctgacccagacgctgagtgaaaaatcccgcgcatttgctgatatcgtcaaaatcggtcgtacccacttgcaggacgccacgccgttaacgctggggcaggagatttccggctgggtagcgatgctggagcataatctcaaacatatcgaatacagcctgcctcacgtagcggaactggc

SEQ ID NO: 582 - DNA, 469 bp, Escherichia coli
cgagcgccattcggcaggcggcggatgaagtactggcaggacagcatgacgacgaattcccgctggctatctggcagaccggctccggcacgcaaagtaacatgaacatgaacgaagtgctggctaaccgggccagtgaattactcggcggcgtgcgcgggatggaacgtaaagttcaccctaacgacgacgtgaacaaaagccaaagttccaacgatgtctttccgacggcgatgcacgttgcggcgctgctggcgctgcgcaagcaactcattccgcagcttaaaaccctgacacagacgctgagtgaaaaatcgcgtgcatttgccgatatcgtcaaaatcggtcgaacccacttgcaggacgccacgccgctaacactggggcaggagatttccggctgggtagcgatgctcgagtataatctcaaacatatcgaatacagcctggctcacgtagcggaactggc

SEQ ID NO: 583 - DNA, 469 bp, Escherichia coli
cgagcgctattcggcaggcggcggatgaagtactggcaggacagcatgacgacgaattcccgctggctatctggcagaccggctccggcacgcaaagtaacatgaacatgaacgaagtgctggctaaccgggccagtgaattactcggcggcgtgcgcgggatggaacgtaaagttcaccctaacgacgacgtgaacaaaagccaaagttccaacgatgtctttccgacggcgatgcacgttgcggcgctgctggcgctgcgcaagcaactcattccgcagcttaaaaccctgacacagacgctgagtgaaaaatcgcgtgcatttgccgatatcgtaaaaatcggtcgaacccacttgcaggacgccacgccgctaacactggggcaggagatttccggctgggtagcgatgctcgagcataatctcaaacatatcgaatacagcctgcctcacgtagcggaactggc

SEQ ID NO: 584 - DNA, 469 bp, Escherichia coli
cgagagctattcgccaggcggcggatgaagtgctggcagggcaacatgatgatgagttcccgctggcaatctggcaaacgggatctggtacgcaaagcaatatgaatatgaatgaagtactggctaaccgggccagcgaattgcttggcggcgtacgcggaatggaacgtaaagttcaccctaacgatgacgtgaacaaaagccaaagctccaatgatgtcttcccaactgctatgcacgtggcggcgttattggcactgcgtaagcaactcattcctcagctcaaaaacctcactcaaactctgaatgagaaatcgcgcgcatttgccgatatcgtcaaaattggtcgtacccacttgcaggacgccacaccgctgactctgggacaggagatttctggttgggtagcgatgctggagcataatctcaaacatattgaatacagcctgcctcacgtagcggaactggc

SEQ ID NO: 585 - DNA, 469 bp, Escherichia coli
cgagcgccattcggcaggcggcggatgaagtactggcaggacagcatgacgacgaattcccattggctatctggcagaccggctccggcacgcaaagtaacatgaacatgaacgaagtgctggctaaccgggccagtgaattactcggcggcgtgcgcgggatggaacgtaaagttcaccctaacgacgacgtgaacaaaagccaaagttccaacgatgtctttccgacggcgatgcacgttgcggcgctgctggcgctgcgcaagcaactcattccgcagcttaaaaccctgacacagacgctgagtgaaaaatcgcgtgcatttgccgatatcgtcaaaattggtcgaacccacttgcaggatgccacgccgctaacactggggcaggagatttccggctgggtagcgatgctggagcataatctcaaacatatcgaatacagcctgcctcacctggcggaactggc

SEQ ID NO: 586 - DNA, 469 bp, Escherichia coli
cgagcgccattcggcaggcggcggatgaagtactggcaggacagcatgacgacgaattcccgctggctatctggcagaccggctccggcacgcaaagtaacatgaatatgaacgaagtgctggctaaccgggccagtgaattactcggcggtgtgcgcgggatggaacgtaaagttcaccctaacgatgacgtgaacaaaagccaaagttccaacgatgtctttccgacggcgatgcacgttgcggcgctgctggcgctgcgcaagcaactcattccgcagcttaaaaccctgacacagacgctgagtgaaaaatcgcgtgcatttgccgatatcgtaaaaatcggtcgaacccacttgcaggacgccaccccgctaacactggggcaggagatttccggctgggtagcgatgctcgagcataatctcaaacatatcgaatacagcctgcctcacgtagcggaactggc

SEQ ID NO: 587 - DNA, 469 bp, Escherichia coli
cgagcgccattcgtcaggcggcggatgaagtactggcaggacagcatgacgacgaattcccgctggctatctggcagaccggctccggcactcaaagtaacatgaacatgaacgaagtgctggctaaccgggccagtgaattactcggcggtgtgcgcgggatggaacgtaaagttcaccctaacgacgacgtgaacaaaagccaaagttccaacgatgtctttccgacggcgatgcacgttgcggcgctgctggcgctgcgcaagcaactcattcctcagcttaaaaccctgacacagacactgaatgagaaatcccgtgcttttgccgatatcgtcaaaattggtcgtactcacttgcaggatgccacgccgttaacgctggggcaggagatttccggctgggtagcgatgctcgagcataatctcaaacatatcgaatacagcctgcctcacgtagcggaactggc

SEQ ID NO: 588 - DNA, 469 bp, Escherichia coli
cgagcgccattcgtcaggcggcggatgaagtactggcaggacagcatgacgacgaattcccgctggctatctggcagaccggctccggcacgcaaagtaacatgaacatgaacgaagtgctggctaaccgggccagtgaattactcggcggtgtgcgcgggatggaacgtaaagttcaccctaacgacgacgtgaacaaaagccaaagttccaacgatgtctttccgacggcgatgcacgttgcggcgctgctggcgctgcgcaagcaactcattcctcagcttaaaaccctgacacagacactgaatgagaaatcccgtgcttttgccgatatcgtcaaaattggtcgtactcacttgcaggatgctacgccgttaacgctggggcaggagatttccggctgggtagcgatgctcgagcataatctcaaacatatcgaatacagcctgcctcacgtagcggaactggc

SEQ ID NO: 589 - DNA, 469 bp, Escherichia coli
cgagcgccattcgtcaggcggcggatgaagtactggcaggacagcatgacgacgaattcccgctggctatctggcagaccggctccggtacgcaaagtaacatgaacatgaacgaagtgctggctaaccgggccagtgaattactcggcggtgtgcgcgggatggaacgtaaagttcaccctaacgacgacgtgaacaaaagccaaagttccaacgatgtctttccgacggcgatgcacgttgcggcgctgctggcgctgcgcaagcaactcattcctcagcttaaaaccctgacacagacactgaatgagaaatcccgtgcttttgccgatatcgtcaaaattggtcgtactcacttgcaggatgccacgccgttaacgctggggcaggagatttccggctgggtagcgatgctcgagcataatctcaaacatatcgaatacagcctgcctcacgtagcggaactggc

SEQ ID NO: 590 - DNA, 469 bp, Escherichia coli
cgagcgccattcgtcaggcggcggatgaagtactggcaggacagcatgacgacgaattcccgctggctatctggcagaccggctccggcacgcaaagtaatatgaacatgaacgaagtgctggctaaccgggccagtgaattacccggcggcgtgcgtgggatggagcgtaaagttcaccctaacgacgacgtgaacaaaagccaaagttctaacgatgtctttccaacggcgatgcacgttgcggcgctgctggcgctgcgcaagcaactcattccgcagcttaaaaccctgacacagacactgaatgagaaatcgcgcgcatttgccgatatcgtcaaaatcggtcgaacccacttgcaggatgccacgccgctaacactggggcaggagatttccggctgggtagcgatgctcgagcataatctcaaacatatcgaatacagcctgccgcatgtagcggaactggc

SEQ ID NO: 591 - DNA, 469 bp, Escherichia coli
cgagcgccattcgtcaggctgcggatgaagtgctggcggggcagcatgatgatgaattcccgctggcaatctggcagaccggttctggcacacaaagtaacatgaacatgaacgaagtgctggccaatcgggcgagtgaactgctcggcggcgtgcgcgggatggaacgtaaagttcaccctaacgatgacgtgaacaaaagccaaagttccaacgatgtctttccgacggcgatgcacgttgcggcgctgctggcgctgcgcaagcaactcattccgcagcttaaaaccctgacacagacgctgagtgaaaaatcgcgtgcatttgccgatatcgtcaaaattggtcgtactcacttgcaggacgccacgccgctaacactggggcaggagatatccggctgggtagcgatgctcgagcataatctcaaacatatcgaatacagcctgcctcacgtagcggaactggc

SEQ ID NO: 592 - DNA, 469 bp, Escherichia coli
cgagcgccattcggcaggcggcggatgaagtactggcaggacagcatgacgacgaattcccgctggctatctggcagaccggctccggcacgcaaagtaacatgaacatgaacgaagtgctggctaaccgggccagtgaattactcggcggtgtgcgcgggatggaacgtaaagttcaccctaacgacgacgtgaacaaaagccaaagttccaacgatgtctttccgacggcgatgcacgttgcggcgctgctggcgctgcgcaagcaactcattccgcagcttaaaaccctgacacagacactgagtgaaaaatcgcgtgcatttgccgatatcgtcaaaatcggtcgaacccacttgcaggacgccacgccgctaacactagggcaggagatttccggctgggtagcgatgctcgagcataatctcaaacatatcgaatacagcctgcctcacgtagcggaactggc

SEQ ID NO: 593 - DNA, 469 bp, Escherichia coli
cgagcgccattcggcaggcggcggatgaagtactggcaggacagcatgacgacgaattcccgctggctatctggcagaccggttctggcacacaaagtaacatgaacatgaacgaagtgctggccaatcgggcgagtgaactgctcggcggcgtgcgcgggatggaacgtaaagttcaccctaacgatgacgtgaacaaaagccaaagttccaacgatgtctttccgacggcgatgcacgttgcggcgctgctggcgctgcgcaagcaactcattccgcagcttaaaaccctgacacagacgctgagtgaaaaatcgcgtgcatttgccgatatcgtaaaaatcggtcgaacccacttgcaggacgccacgccgctaacactggggcaggagatttccggctgggtagcgatgctcgagcataatctcaaacatatcgaatacagcctgcctcacgtagcggaactggc

SEQ ID NO: 594 - DNA, 469 bp, Escherichia coli
cgagcgccattcgtcaggcggcggatgaagtactggcaggacagcatgacgatgaattcccgctggcaatctggcagaccggctccggcacgcaaagtaatatgaacatgaacgaagtgctggctaatcgggccagtgaattacttggcggcgtgcgcgggatggagcgtaaagttcaccctaacgacgacgtgaacaaaagccaaagttccaatgatgtctttccgacggcgatgcacgttgcggcgctgctggcgctgcgcaagcaactcattccgcagcttaaaaccctgacacagacgctgagtgaaaaatcgcgcgcatttgccgatatcgtcaaaatcggtcgaacccacttgcaggatgccacgccgctaacactggggcaggagatttccggctgggtagcgatgctcgagcataatctcaaacatattgaatacagcctgcctcacgtagcggaactggc

SEQ ID NO: 595 - DNA, 469 bp, Escherichia coli
cgagcgccattcgtcaggcggcggatgaagtactggcaggacagcatgacgacgaattcccgctggctatctggcagaccggctccggcacgcaaagtaacatgaacatgaacgaagtgctggctaaccgggccagtgaattactcggcggtgtgcgcgggatggaacgtaaagttcatcctaacgacgacgtgaacaaaagccaaagttccaacgatgtctttccgacggcgatgcacgttgcggcgctgctggcgctgcgcaagcaactcattcctcagcttaaaaccctgacacagacactgaatgagaaatcccgtgcttttgccgatatcgtcaaaattggtcgtactcacttgcaggatgccacgccgttaacgctggggcaggagatttccggctgggtagcgatgctcgagcataatctcaaacatatcgaatacagcctgcctcacgtagcggaactggc

SEQ ID NO: 596 - DNA, 469 bp, Escherichia coli
cgagcgccattcgtcaggcggcggatgaagtactggcaggacagcatgacgacgaattcccgctggctatctggcagaccggctccggcacgcaaagtaacatgaacatgaacgaagtgctggctaaccgggccagtgaattactcggcggtgtgcgcgggatggaacgtaaagttcaccctaacgacgacgtgaacaaaagccaaagttccaacgatgtctttccgacggcgatgcacgttgcggcgctgctggcgctgcgcaagcaactcattcctcagcttaaaaccctgacacagacactgaatgagaaatcccgtgcttttgccgatatcgtcaaaattggtcgtactcacttgcaggatgccacgccgttaacgctggggcaggagatttccggctgggtagcgatgctcgagcataatcttaaacatatcgaatacagcctgcctcacgtagcggaactggc

SEQ ID NO: 597 - DNA, 469 bp, Escherichia coli
cgagcgccattcggcaggcggcggatgaagtactggcaggacagcatgacgacgaattcccgctggctatctggcagaccggctccggcacgcaaagtaacatgaacatgaatgaagtgctggctaaccgggccagtgaattactcggcggcgtgcgcgggatggaacgtaaagttcaccctaacgacgacgtgaacaaaagtcaaagttccaacgatgtctttccgacggcgatgcacgttgcggcactactggcgctgcgcaagcaactcattccacaacttaaaaccctgacccagacgctgagtgaaaaatcccgcgcatttgccgatatcgtcaaaatcggtcgtacccacttgcaggacgcgacgccgttaacgctggggcaggagatttccggctgggtagcgatgctggagcataatctcaaacatatcgaatacagcctgcctcacgtagcggaactggc

SEQ ID NO: 598 - DNA, 469 bp, Escherichia coli
cgagcgccattcggcaggcggcggatgaagtactggcaggacagcatgacggcgaattcccgctggctatctggcagaccggctccggcacgcaaagtaacatgaacatgaacgaagtgctggctaaccgggccagtgaattactcggcggcgtgcgcgggatggaacgtaaagttcaccctaacgacgacgtcaacaaaagccaaagttccaacgatgtctttccgacggcgatgcacgttgcggcgctgctggcgctgcgcaagcaactcattccgcagcttaaaaccctgacacagacgctgagtgaaaaatcgcgtgcatttgccgatatcgtaaaaatcggtcgaacccacttgcaggacgccacgccgctaacactggggcaggagatttccggctgggtagcgatgctcgagcataatctcaaacatatcgaatacagcctgcctcacgtagcggaactggc

SEQ ID NO: 599 - DNA, 469 bp, Escherichia coli
cgagcgccattcggcaggcggcggatgaagtactggcaggacagcatgacgatgaattcccgctggctatctggcagaccggctccggcacgcaaagtaacatgaacatgaacgaagtgctggctaaccgggccagtgaattactcggcggtgtgcgcgggatggaacgtaaagttcaccctaacgacgacgtgaacaaaagccaaagttccaacgatgtctttccgacggcgatgcacgttgctgcgctgctggcgctgcgcaagcaactcattccgcagcttaaaaccctgacacagacactgaatgagaaatcccgtgcatttgccgatatcgtcaaaattggtcgtactcacttgcaggatgccacgccgttaacactggggcaggagatttccggctgggtagcgatgctcgagcataatctcaaacatatcgaatacagcctgcctcacgtagcggaactggc

SEQ ID NO: 600 - DNA, 469 bp, Escherichia coli
cgagcgccattcgtcaggcggcggatgaagtactggcaggacagcatgacgacgaattcccgctggctatctggcagaccggctccggcacgcaaagtaacatgaacatgaacgaagtgctggctaaccgggccagtgaattactcggcggtgtgcgcgggatggaacgtaaagttcaccctaacgatgacgtgaacaaaagccaaagttccaacgatgtctttccgacggcgatgcacgttgcggcgctgctggcgctgcgcaagcaactcattccgcagcttaaaaccctgacacagacgctgagtgaaaaatcgcgtgcatttgccgatatcgtaaaaatcggtcgaacccacttgcaggacgccacgccgctaacactggggcaggagatttccggctgggtagcgatgctcgagcataatctcaaacatatcgaatacagcctgcctcacgtagcggaactggc

SEQ ID NO: 601 - DNA, 469 bp, Escherichia coli
cgagcgccattcggcaggcggcggatgaagtactggcaggacagcatgacgatgaattcccgctggctatctggcagaccggctccggcacgcaaagtaacatgaacatgaacgaagtgctggctaaccgggccagtgaattactcggcggcgtgcgcgggatggaacgtaaagttcaccctaacgacgacgtgaacaaaagccaaagttccaacgatgtctttccgacggcgatgcacgttgcggcgctgctggcgctgcgcaagcaactcattccacaacttaaaaccctgacccagacgctgagtgaaaaatcccgcgcatttgccgatatcgtcaaaatcggtcgtacccacttgcaggacgccacgccgttaacgctggggcaggagatttccggctgggtagcgatgctggagcataatctcaaacatatcgaatacagcctgcctcacgtagcggaactggc

SEQ ID NO: 602 - DNA, 469 bp, Escherichia coli
cgagcgccattcggcaggcggcggatgaagtactggcaggacagcatgacgacgaattcccgttggctatctggcagaccggctccggcacgcaaagtaacatgaacatgaacgaagtgctggctaaccgggccagtgaattactcggcggcgtgcgcgggatggaacgtaaagttcaccctaacgacgacgtgaacaaaagccaaagttccaacgatgtctttccgacggcgatgcacgttgcggcgctgctggcgctgcgcaagcaactcattccacaacttaaaaccctgacccagacgctgagtgaaaaatcccgcgcatttgctgatatcgtcaaaatcggtcgtacccacttgcaggacgccacgccgttaacgctggggcaggagatttccggctgggtagcgatgctggagcataatctcaaacatatcgaatacagcctgcctcacgtagcggaactggc

SEQ ID NO: 603 - DNA, 469 bp, Escherichia coli
cgagcgccattcgtcaggcggcggatgaagtactggcaggacagcatgacgacgaattcccgctggctatctggcagaccggctccggcacgcaaagtaacatgaacatgaacgaagtgctggctaaccgggccagtgaattactcggcggtgtgcgcgggatggaacgtaaagttcaccctaacgacgacgtgaacaaaagccaaagttccaacgatgtctttccgacggcgatgcacgttgcggcgctgctggcgctgcgcaagcaactcattccgcagcttaaaaccctgacacagacgctgagtgaaaaatcgcgtgcatttgccgatatcgtaaaaatcggtcgaacccacttgcaggacgccaccccgctaacactggggcaggagatttccggctgggtagcgatgctcgagcataatctcaaacatatcgaatacagcctgcctcacgtagcggaactggc

SEQ ID NO: 604 - DNA, 469 bp, Escherichia coli
cgagcgccattcggcaggcggcggatgaagtactggcaggacagcatgacgacgaattcccgctggctatctggcagaccggctccggcacgcaaagtaacatgaacatgaacgaagtgctggctaaccgggccagtgaattactcggcggcgtgcgcgggatggaacgtaaagttcaccctaacgacgacgtgaacaaaagccaaagttccaacgatgtctttccgacggcgatgcacgttgcggcgctgctggcgctgcgcaagcaactcattccgcagcttaaaaccctgacacagacactgagtgaaaaatcgcgtgcatttgccgatatcgtcaaaatcggtcgaacccacttgcaggacgccacaccgctaacactagggcaggagatttccggctgggtagcgatgctcgagcataatctcaaacatatcgaatacagcctgcctcacgtagcggaactggc

SEQ ID NO: 605 - DNA, 469 bp, Escherichia coli
cgagcgccattcggcaggcggcggatgaagtactggcaggacagcatgacgacgaattcccgctggctatctggcagaccggctccggcacgcaaagtaacatgaacatgaacgaagtgctggctaaccgggccagtgaattactcggcggcgtgcgcgggatggaacgtaaagttcaccctaatgacgacgtgaacaaaagccaaagttccaacgatgtctttccgacggcgatgcacgttgcggcgctgctggcgctgcgcaagcaactcattccgcagcttaaaaccctgacacagacgctgagtgaaaaatcgcgtgcatttgccgatatcgtcaaaatcggtcgaacccacttgcaggacgccacgccgctaacactggggcaggagatttccggctgggtagcgatgctcgagtataatctcaaacatatcgaatacagcctgcctcacgtagcggaactggc

SEQ ID NO: 606 - DNA, 469 bp, Escherichia coli
cgagcgccattcgtcaggcggcggatgaagtactggcaggacagcatgacgacgaattcccgctggctatctggcagaccggctccggcacgcaaagtaacatgaacatgaatgaagtgctggctaaccgggccagtgaattactcggcggtgtgcgcgggatggaacgtaaagttcaccctaacgacgacgtgaacaaaagccaaagttccaacgatgtctttccgacggcgatgcacgttgcggcgctgctggcgctgcgcaagcaactcattcctcagcttaaaaccctgacacagacactgaatgagaaatcccgtgcttttgccgatatcgtcaaaattggtcgtactcacttgcaggatgccacgccgttaacgctggggcaggagatttccggctgggtagcgatgctcgagcataatctcaaacatatcgaatacagcctgcctcacgtagcggaactggc

SEQ ID NO: 607 - DNA, 469 bp, Escherichia coli
cgagagccattcgccaggcggcggatgaagtgctggcagggcaacatgatgatgagttcccgctggcaatctggcaaacgggatccggtacgcaaagcaatatgaatatgaatgaagtactggctaatcgggccagcgaattgcttggcggcgtacgcggaatggaacgtaaagttcaccctaacgatgacgtgaacaaaagccaaagctccaatgatgtcttcccaactgctatgcacgtggcggcgttattggcactgcgtaagcaactcattcctcagctcaaaaacctcactcaaactctgaatgagaaatcgcgtgcatttgccgatatcgtcaaaattggtcgtacccacttgcaggacgccacaccgctgaccctgggacaggagatttctggttgggtagcgatgctggagcataatctcaaacatattgaatacagcctgcctcacgtagcggaactggc

SEQ ID NO: 608 - DNA, 469 bp, Escherichia coli
cgagcgccattcggcaggcggcggatgaagtactggcaggacagcatgacgacgaattcccgcttgctatctggcagaccggctccggcacgcaaagtaacatgaacatgaacgaagtgctggctaaccgggccagtgaattactcggcggcgtgcgtgggatggagcgtaaagttcaccctaacgacgacgtgaacaaaagccaaagttctaacgatgtctttccaacagcgatgcacgttgcggcgctgctggcgctgcgcaagcaactcattccgcagcttaaaaccctgacacagacgctgagtgaaaaatcccgtgcatttgccgatatcgtaaaaatcggtcgaacccacttgcaggacgccacgccgctaacactggggcaggagatttccggctgggtagcgatgctcgagcataatctcaaacatattgaatacagcctgcctcacgtagcggaactggc

SEQ ID NO: 609 - DNA, 469 bp, Escherichia coli
cgagcgccattcggcaggcggcggatgaagtactggcaggacagcatgacgacgaattcccgcttgctatctggcagaccggctccggcacgcaaagtaacatgaacatgaacgaagtgcttgctaaccgcgccagtgaattactcggcggcgtgcgtgggatggagcgtaaagttcaccctaacgacgacgtgaacaaaagccaaagttctaacgatgtctttccaacggcgatgcacgttgcggcgctgctggcgctgcgcaagcaactcattccgcagcttaaaaccctgacacagacactgaatgagaaatcccgtgcatttgccgatatcgtaaaaatcggtcgtacccacttacaggatgccacgccgctaacactggggcaggagatttccggctgggtagcgatgctcgagcataatctcaaacatatcgaatacagcctgccgcatgtagcggaactggc

SEQ ID NO: 610 - DNA, 469 bp, Escherichia coli
cgagcgccattcgtcaggcggcggatgaagtactggcaggacagcatgacgacgaattcccgctggctatctggcagaccggctccggcacgcaaagtaacatgaacataaacgaagtgctggctaaccgggccagtgaattactcggcggtgtgcgcgggatggaacgtaaagttcaccctaacgatgacgtgaacaaaagccaaagttccaacgatgtctttccgacggcgatgcacgttgcggcgctgctggcgctgcgcaagcaactcattccgcagcttaaaaccctgacacagacgctgagtgaaaaatcgcgtgcatttgccgatatcgtaaaaatcggtcgaacccacttgcaggacgccacgccgctaacactggggcaggagatttccggctgggtagcgatgctcgagcataatctcaaacatatcgaatacagcctgcctcacgtagcggaactggc

SEQ ID NO: 611 - DNA, 469 bp, Escherichia coli
cgagcgccattcggcaggcggcggatgaagtactggcaggacagcatgacgacgaattcccgctggctatctggcagaccggctctggcacgcaaagtaacatgaacatgaatgaagtgctggctaaccgggccagtgaattactcggcggcgtgcgcgggatggaacgtaaagttcaccctaacgacgacgtgaacaaaagccaaagttccaacgatgtctttccgacggcgatgcacgttgcggcactactggcgctgcgcaagcaactcattccacaacttaaaaccctgacccagacgctgagtgaaaaatcccgcgcatttgccgatatcgtcaaaatcggtcgtacccacttgcaggacgcgacgccgttaacgctggggcaggagatttccggctgggtagcgatgctggagcataatctcaaacatatcgaatacagcctgcctcacgtagcggaactggc

SEQ ID NO: 612 - DNA, 469 bp, Escherichia coli
cgagcgccattcgtcaggcggcggatgaagtactggcaggacagcatgacgatgaattcccgctggctatctggcagaccggctccggcacgcaaagtaatatgaacatgaacgaagtgctggctaaccgggccagtgaattacttggcggcgtgcgcgggatggagcgtaaagttcatcctaacgacgacgtgaacaaaagccaaagttccaatgatgtctttccgacggcgatgcacgttgcggcgctgctggcgctgcgcaagcaactcattccgcagcttaaatccctgacacagacgctgagtgaaaaatcgcgtgcatttgccgatatcgtcaaaatcggtcgaacccacttgcaggatgccacgccgctaacactggggcaggagatttccggctgggtagcgatgctggagcataatctcaaacatatcgaatacagcctgccgcatgtagcggaactggc

SEQ ID NO: 613 - DNA, 469 bp, Escherichia coli
cgagcgccattcggcaggcggcggatgaagtactggcaggacagcatgacgacgaattcccgctggctatctggcagaccggctccggcacgcaaagtaacatgaacatgaacgaagtgctggctaaccgggccagtgaattactcggcggcgtgcgcgggatggagcgtaaagttcaccctaacgacgacgtgaacaaaagccaaagttccaacgatgtctttccgacggcgatgcacgttgcggcgctgctggcgctgcgcaagcaactcattccgcagcttaaaaccctgacacagacactgagtgaaaaatcgcgtgcatttgccgatatcgtcaaaatcggtcgaacccacttgcaggacgccacgccgctaacactagggcaggagatttccggctgggtagcgatgctcgagcataatctcaaacatatcgaatacagcctgcctcacgtagcggaactggc

SEQ ID NO: 614 - DNA, 469 bp, Escherichia coli
cgagcgccattcggcaggcggcggatgaagtactggcaggacagcatgacgacgaattcccgctggctatctggcagaccggctccggcacgcaaagtaacatgaacatgaacgaagtgctggctaaccgggccagtgaattactcggcggcgtgcgcgggatggaacgtaaagttcaccctaacgacgacgtgaacaaaagccaaagttccaacgatgtctttccgacggcgatgcacgttgcggcgctgctggcgctgcgcaagcaactcattccgcagcttaaaaccctgacacagacgctgagagaaaaatcgcgtgcatttgccgatatcgtcaaaatcggtcgaacccacttgcaggacgccacgccgctaacactagggcaggagatttccggctgggtagcgatgctcgagcataatctcaaacatatcgaatacagcctgcctcacgtagcggaactggc

SEQ ID NO: 615 - DNA, 469 bp, Escherichia coli
cgagcgccattcgtcaggctgcggatgaagtgctggcggggcagcatgatgatgaattcccgctggcaatctggcagaccggttctggcacacaaagtaacatgaacatgaacgaagtgctggccaatcgggcgagtgaactgctcggcggcgtgcgcgggatggaacgtaaagttcaccctaacgatgacgtgaacaaaagccaaagttccaacgatgtctttccgacggcgatgcacgttgcggcgctgctggcgctgcgcaagcaactcattccgcagcttaaaaccctgacacagacgctgagtgaaaaatcgcgtgcatttgccgatatcgtcaaaattggtcgtactcacttgcaggacgccacgccgctaacactggggcaggagatttccggctgggtagcgatgctcgagcataatctcaaacatatcgaatacagcctgcctcacgtagcggaactggc

SEQ ID NO: 616 - DNA, 469 bp, Escherichia coli
cgagcgccattcggcaggcggcggatgaagtactggcaggacagcatgacgacgaattcccattggctatctggcagaccggctccggcacgcaaagtaacatgaacatgaacgaagtgctggctaaccgggccagtgaattactcggcggcgtgcgtgggatggagcgtaaagttcaccctaacgacgacgtgaacaaaagccaaagttctaacgatgtctttccaacggcggtgcacgttgcggcgctgctggcgctgcgcaagcaactcattccgcagcttaaaaccctgacacagacgctgagtgaaaaatcccgtgcatttgccgatatcgtaaaaatcggtcgaacccacttgcaggacgccacgccgctaacactggggcaggagatttccggctgggtagcgatgctcgagcataatctcaaacatattgaatacagcctgcctcacgtagcggaactggc

SEQ ID NO: 617 - DNA, 469 bp, Escherichia coli
cgagcgccattcgtcaggcggcggatgaagtactggcaggacagcatgacgacgaattcccgctggctatctggcagaccggctccggcacgcaaagtaacatgaacatgaacgaagtgctggctaaccgggccagtgaattactcggcggtgtgcgcgggatggaacgtaaagttcaccctaacgacgacgtgaacaaaagccaaagttccaacgatgtttttccgacggcgatgcacgttgcggcgctgctggcgctgcgcaagcaactcattcctcagcttaaaaccctgacacagacactgaatgagaaatcccgtgcttttgccgatatcgtcaaaattggtcgtactcacttgcaggatgccacgccgttaacgctggggcaggagatttccggctgggtagcgatgctcgagcataatctcaaacatatcgaatacagcctgcctcacgtagcggaactggc

SEQ ID NO: 618 - DNA, 469 bp, Escherichia coli
cgagcgccattcggcatgcggcggatgaagtactggcaggacagcatgacgacgaattcccgctggctatctggcagaccggctccggcacgcaaagtaacatgaacatgaacgaagtgctggctaaccgggccagtgaattactcggcggtgtgcgcgggatggaacgtaaagttcaccctaacgacgacgtgaacaaaagccaaagctccaacgatgtctttccgacggcgatgcacgttgcggcgctgctggcgctgcgcaagcaactcattccgcagcttaaaaccctgacacagacactgaatgagaaatcccgtgcatttgccgatatcgtcaaaattggtcgtactcacttgcaggatgccacgccgctaacactggggcaggagatttccggctgggtagcgatgctcgagcataatctcaaacatatcgaatacagcctgcctcacgtagcggaactggc

SEQ ID NO: 619 - DNA, 469 bp, Escherichia coli
cgagcgccattcggcaggcggcggatgaagtactggcaggacagcatgacgacgaattcccgctggctatctggcagaccggctccggcacgcaaagtaacatgaacatgaacgaagtgctggctaaccgggccagtgaattactcggcggcgtgcgcggggtggaacgtaaagttcaccctaacgacgacgtgaacaaaagccaaagttccaacgatgtctttccgacggcgatgcacgttgcggcgctgctggcgctgcgcaagcaactcattccgcagcttaaaaccctgacacagacgctgagtgaaaaatcgcgtgcatttgccgatatcgtcaaaatcggtcgaacccacttgcaggacgccacgccgctaacactagggcaggagatttccggctgggtagcgatgctcgagcataatctcaaacatatcgaatacagcctgcctcacgtagcggaactggc

SEQ ID NO: 620 - DNA, 469 bp, Escherichia coli
cgagcgccattcgtcaggcggcggatgaagtactggcaggacagcatgacgacgaattcccgctggctatctggcagaccggctccggcacgcaaagtaacatgaacatgaacgaagtgctggctaaccgggccagtgaattactcggcggtgtgcgcgggatggaacgtaaagttcaccctaacgacgacgtgaacaaaagccaaagttccaacgatgtctttccgacggcgatgcacgttgcggcgctgctggcgctgcgcaagcaactcattcctcagcttaaaaccctgacacagacactgaatgagaaatcccgtgcttttgacgatatcgtcaaaattggtcgtactcacttgcaggatgccacgccgttaacgctggggcaggagatttccggctgggtagcgatgctcgagcataatctcaaacatatcgaatacagcctgcctcacgtagcggaactggc

SEQ ID NO: 621 - DNA, 469 bp, Escherichia coli
cgagcgccattcggcaggcggcggatgaagtactggcaggacagcatgacgacgaattcccattggctatctggcagaccggctctggcacgcaaagtaacatgaacatgaacgaagtgctggctaaccgggccagtgaattactcggcggcgtgcgtgggatggagcgtaaagttcaccctaacgacgacgtgaacaaaagccaaagttctaacgatgtctttccaacggcggtgcacgttgcggcgctgctggcgctgcgcaagcaactcattccgcagcttaaaaccctgacacagacgctgagtgaaaaatcccgtgcatttgccgatatcgtaaaaatcggtcgaacccacttgcaggacgccacgccgctaacactggggcaggagatttccggctgggtagcgatgctcgagcataatctcaaacatattgaatacagcctgcctcacgtagcggaactggc

SEQ ID NO: 622 - DNA, 469 bp, Escherichia coli
cgagcgccattcggcaggcggcggatgaagtactggcaggacagcatgacgacgaattcccgctggctatctggcagaccggctccggcacgcaaagtaacatgaacatgaacgaagtgctggctaaccgggccagtgaattactcggcggcgtgcgcgggatggaacgtaaagttcaccctaacgacgacgtgaacaaaagccaaagttccaacgatgtctttccgacggagatgcacgttgcggcgctgctggcgctgcgcaagcaactcattccacaacttaaaaccctgacccagacgctgagtgaaaaatcccgcgcatttgccgatatcgtcaaaatcggtcgtacccacttgcaggacgccacgccgttaacgctggggcaggagatttccggctgggtagcgatgctggagcataatctcaaacatatcgaatacagcctgcctcacgtagcggaactggc

SEQ ID NO: 623 - DNA, 469 bp, Escherichia coli
cgagcgccattcggcaggcggcggatgaagtactggcaggacatcatgacgacgaattcccgctggctatctggcagaccggctccggcacgcaaagtaacatgaacatgaacgaagtgctggctaaccgagccagtgaattactcggcggcgtgcgcgggatggaacgtaaagttcaccctaacgacgacgtgaacaaaagccaaagttccaacgatgtctttccgacggcgatgcacgttgcggcgctgctggcgctgcgcaagcaactcattcctcagcttaaaaccctgacacagacactgaatgagaaatcccgtgcatttgccgatatcgtcaaaattggtcgtactcacttgcaggatgccacgccgttaacactggggcaggagatttccggctgggtagcgatgctcgagcataatctcaaacatatcgaatacagcctgcctcacgtagcggaactggc

SEQ ID NO: 624 - DNA, 469 bp, Escherichia coli
cgagcgccattcggcaggcggcggatgaagtactggcaggacagcatgacgacgaattcccattggctatctggcagaccggctccggcacgcaaagtaacatgaacatgaacgaagtgctggctaaccgggccagtgaattactcggcggcgtgcgtgggatggagcgtaaagttcaccctaacgacgacgtgaacaaaagccaaagttctaacgatgtctttccaacggcgatgcacgttgcggcgctgctggcgctgcgcaagcaactcattccgcagcttaaaaccctgacacagacgctgagtgaaaaatcccgtgcgtttgccgatatcgtaaaaatcggtcgaacccacttgcaggacgccacgccgctaacactggggcaggagatttccggctgggtagcgatgctcgagcataatctcaaacatattgaatacagcctgcctcacgtagcggaactggc

SEQ ID NO: 625 - DNA, 469 bp, Escherichia coli
cgagcgccattcggcaggcggcggatgaagtactggcaggacagcatgacgacgaattcccgctggctatctggcagaccggctccggcacgcaaagtaacatgaacatgaacgaagtgctggctaaccgggccagtgaattactcggcggcgtgcgcgggatggaacgtaaagttcaccctaacgacgacgtgaacaaaagccaaagttccaacgatgtctttccgacggcgatgcacgttgcggcgctgctggcgctgcgcaagcaactcattccgcagcttgaaaccctgacacagacactgagtgaaaaatcgcgtgcatttgccgatatcgtcaaaatcggtcgaacccacttgcaggacgccacgccgctaacactagggcaggagatttccggctgggtagcgatgctcgagcataatctcaaacatatcgaatacagcctgcctcacgtagcggaactggc

SEQ ID NO: 626 - DNA, 469 bp, Escherichia coli
cgagcgccattcggcaggcggcggatgaagtactggcaggacagcatgacgacgaattcccgctggctatctggcagaccggctccggcacgcaaagtaacatgaacatgaacgaagtgctggctaaccgggccagtgaattactcggcggcgtgcgcgggatggaacgtaaagttcaccctaacgacgacgtgaacaaaagccaaagttccaacgatgtctttccgacggcgatgcacgttgcggcgctgctggcgctgcgcaagcaactcattccgcagcttaaaaccctgacacagacgctgagtgaaaaatcgcgtgcatttgccgatatcgtaaaaatcggtcgaacccacttgcaggacgccacaccgctaacactggggcaggagatttccggctgggtagcgatgctcgagcataatctcaaacatatcgaatacagcctgcctcacgtagcggaactggc

SEQ ID NO: 627 - DNA, 469 bp, Escherichia coli
cgagcgccattcggcaggcggcggatgaagtactggcaggacagcatgacgacgaattcccgctggctatctggcagaccggctccggcacgcaaagtaacatgaacatgaacgaagtgctggctaaccgggccagtgaattactcggcggcgtgcgcgggatggaacgtaaagttcaccctaacgacgacgtgaacaaaagccaaagttccaacgatgtctttccgacggcgatgcacgttgcggcgctgctggcgctgcgcaagcaactcattccacaacttaaaaccctgacccagatgctgagtgaaaaatcccgcgcatttgccgatatcgtcaaaatcggtcgtacccacttgcaggacgccacgccgttaacgctggggcaggagatttccggctgggtagcgatgctggagcataatctcaaacatatcgaatacagcctgcctcacgtagcggaactggc

SEQ ID NO: 628 - DNA, 469 bp, Escherichia coli
cgagcgccattcggcaggcggcggatgaagtactggcaggacagcatgacgacgaattcccgctggctatatggcagaccggctccggcacgcaaagtaacatgaacatgaatgaagtgctggctaaccgggccagtgaattactcggcggcgtgcgcgggatggaacgtaaagttcaccctaacgacgacgtgaacaaaagccaaagttccaacgatgtctttccgacggcgatgcacgttgcggcgcggctggcgctgcgcaagcaactcattccgcagcttaaaaccctgacacagacgctgagtgaaaaatcgcgtgcatttgccgatatcgtaaaaatcggtcgaacccacttgcaggacgccaccccgctaacactggggcaggagatttccggctgggtagcgatgctcgagcataatctcaaacatatcgaatacagcctgcctcacgtagcggaactggc

SEQ ID NO: 629 - DNA, 469 bp, Escherichia coli
cgagcgccattcggcaggcggcggatgaagtactggcaggacagcatgacgacgaattcccgcttgctatctggcagaccggctccggcacgcaaagtaacatgaacatgaacgaagtgcttgctaaccgcgccagtgaattactcggcggcgtgcgtgggatggagcgtaaagttcaccctaacgacgacgtgaacaaaagccaaagttctaacgatgtctttccaacggcgatgcacgttgcggcgctgctggcgctgcgcaagcaactcattccgcagattaaaaccctgacacagacactgaatgagaaatcccgtgcatttgccgatatcgtaaaaatcggtcgaacccacttgcaggacgccacgccgctaacactggggcaggagatttccggctgggtagcgatgctggagcataatctcaaacatattgaatacagcctgcctcacgtagcggaactggc

SEQ ID NO: 630 - DNA, 469 bp, Escherichia coli
cgagcgccattcgtcaggcggcggatgaagtactggcaggacagcatgacgatgaattcccgctggcaatctggcagaccggctccggcacgcaaagtaatatgaacatgaacgaagtgctggctaatcgggccagtgaattacttggcggcgtgcgcgggatggagcgtaaagttcatcctaacgacgacgtgaacaaaagccaaagttccaacgatgtctttccgacggcgatgcacgttgcggcgctgctggcgctgcgcaagcaactcattccacagcttaaaaccctgacacagacgctgagtgaaaaatcgcgcgcatttgccgatatcgtcaaaattggtcgtacccacttgcaggatgccacgccgctaacactggggcaggagatttccggctgggtagcgatgctcgagcataatctcaaacatatcgaatacagcctgccgcatgtagcggaactggc

SEQ ID NO: 631 - DNA, 469 bp, Escherichia coli
cgagcgccattcgtcaggcggcggatgaagtactggcaggacagcatgacgacgaattcccgctggctatctggcagaccggctccggcacgcaaagtaacatgaacatgaacgaagtgctggctaaccgggccagtgaattactcggcggtgtgcgcgggatggaacgtaaagttcaccctaacgacgacgtgaacaaaagccaaagttccaacgatgtcgttccgacggcgatgcacgttgcggcgctgctggcgctgcgcaagcaactcattcctcagcttaaaaccctgacacagacactgaatgagaaatcccgtgcttttgccgatatcgtcaaaattggtcgtactcacttgcaggatgccacgccgttaacgctggggcaggagatttccggctgggtagcgatgctcgagcataatctcaaacatatcgaatacagcctgcctcacgtagcggaactggc

SEQ ID NO: 632 - DNA, 469 bp, Escherichia coli
cgagcgccattcgtcaggcggcggatgaagtactggcaggacagcatgacgacgaattcccgctggctatctggcagaccggctccggcacgcaaagtaacatgaacatgaacgaagtgctggctaaccgggccagtgaattactcggcggtgtgcgcgggatggaacgtaaagttcaccctaacgacgacgtgaacaaaagccaaagttccaacgatgtctttccgacggcgatgcacgttgcggcgctgctggcgctgcgcaagcaactcattcctcagcttaaaaccctgacacagacactgaatgagaaatcccgtgcttttgccgatatcgtcaaaattggtcgtactcacttgcaggatgccacgccgttatcgctggggcaggagatttccggctgggtagcgatgctcgagcataatctcaaacatatcgaatacagcctgcctcacgtagcggaactggc

SEQ ID NO: 633 - DNA, 469 bp, Escherichia coli
cgagcgccattcggcaggcggcggatgaagtactggcaggacagcatgacgacgaattcccgctggctatctggcagaccggctccggcacgcaaagtaacatgaacatgaacgaagtgctggctaaccgggccagtgaattactcagcggcgtgcgcgggatggaacgtaaagttcaccctaacgacgacgtgaacaaaagccaaagttccaacgatgtctttccgacggcgatgcacgttgcggcgctgctggcgctgcgcaagcaactcattccgcagcttaaaaccctgacacagacactgagtgaaaaatcgcgtgcatttgccgatatcgtcaaaatcggtcgaacccacttgcaggacgccacgccgctaacactagggcaggagatttccggctgggtagcgatgctcgagcataatctcaaacatatcgaatacagcctgcctcacgtagcggaactggc

SEQ ID NO: 634 - DNA, 469 bp, Escherichia coli
cgagcgccattcggcaggcggcggatgaagtactggcaggacagcatgacgatgaattcccgctggctatctggcagaccggctccggcacgcaaagtaacatgaacatgaacgaagtgctggctaaccgggccagtgaattactcggcggcgtgcgcgggatggaacgtaaagttcaccctaacgacgacgtgaacaaaagccaaagttccaacgatgtctttccgacggcgatgcacgttgcggcgctgctggcgctgcgcaagcaactcattccgcagcttaaaaccctgacacagacgctgagtgaaaaatcgcgtgcatttgccgatatcgtaaaaatcggtcgaacccacttgcaggacgccacgccgctaacactggggcaggagatttccggctgggtagcgatgctcgagcataatctcaaacatatcgaatacagcctgcctcacgtagcggaactggc

SEQ ID NO: 635 - DNA, 469 bp, Escherichia coli
cgagcgccattcggcaggcagcggatgaagtactggcaggacagcatgacgacgaattcccgctggctatctggcagaccggctccggcacgcaaagtaacatgaacatgaacgaagtgctggctaaccgggccagtgaattactcggcggcgtgcgcgggatggaacgtaaagttcaccctaacgacgacgtgaacaaaagccaaagttccaacgatgtctttccgacggcgatgcacgttgcggcgctgctggcgctgcgcaagcaactcattccgcagcttaaaaccctgacacaggcgctgagtgaaaaatcccgtgcatttgccgatatcgtcaaaatcggtcgaacccacttgcaggacgccacgccgctaacactagggcaggagatttccggctgggtagcgatgctcgagcataatctcaaacatatcgaatacagcctgcctcacgtagcggaactggc

SEQ ID NO: 636 - DNA, 469 bp, Escherichia coli
cgagcgccattcggcaggcggcggatgaagtactggcaggacatcatgacgacgaattcccgctggctatctggcagaccggctccggcacgcaaagtaacatgaacatgaacgaagtgctggctaaccgggccagtgaattactcggcggcgtgcgcgggatggaacgtaaagttcaccctaacgacgacgtgaacaaaagccaaagttccaacgatgtctttccgacggcgatgcacgttgcggcgctgctggcgctgcgcaagcaactcattccgcagcttaaaaccctgacacagacgctgagtgagaaatcgcgtgcatttgccgatatcgtaaaaatcggtcgaacccacttgcaggacgccaccccgctaacactggggcaggagatttccggctgggtagcgatgctcgagcataatctcaaacatatcgaatacagcctgcctcacgtagcggaactggc

SEQ ID NO: 637 - DNA, 469 bp, Escherichia coli
cgaacgccattcgtcaggcggcggatgaagtactggcaggacagcatgacgacgaattcccgctggctatctggcagaccggctccggcacgcaaagtaatatgaacatgaacgaagtgctggctaaccgggccagtgaattactcggcggcgtgcgtgggatggagcgtaaagttcaccctaacgacgacgtgaacaaaagccaaagttctaacgatgtctttccaacggcgatgcacgttgcggcgctgctggcgctgcgcaagcaactcattccgcagcttaaaaccctgacacagacactgaatgagaaatcgcgcgcatttgccgatatcgtcaaaatcggtcgaacccacttgcaggatgccacgccgctaacactggggcaggagatttccggctgggtagcgatgctcgagcataatctcaaacatatcgaatacagcctgccgcatgtagcggaactggc

SEQ ID NO: 638 - DNA, 469 bp, Escherichia coli
cgagcgccattcggcaggcggcggatgaagtactggcaggacagcatgacgacgaattcccgctggctatctggcagaccggctccggcacgcaaagtaacatgaacatgaacgaagtgctggctaaccgggccagtgaattactcggcggtgtgcgcgggatggaacgtaaagttcaccctaacgatgacgtgaacaaaagccaaagttccaacgatgtctttccgacggcgatgcacgttgcggcgctgctggcgctgcgcaagcaactcattcctcagcttaaaaccctgacacagacactgaatgagaaatcccgtgcatttgccgatattgtcaaaattggtcgtactcacttgcaggatgccacgccgttaacactggggcaggagatttccggctgggtagcgatgctcgagcataatctcaaacatatcgaatacagcctgcctcacgtagcggaactggc

SEQ ID NO: 639 - DNA, 469 bp, Escherichia coli
cgagcgccattcggcaggcggcggatgaagtactggcaggacagcatgacgacgaattcccgctggctatctggcagaccggctccggcacgcaaagtaacatgaacatgaacgaagtgctggctaaccgggccagtgaattactcggcggcgtgcgcgggatgaaacgtaaagttcaccctaacgacgacgtgaacaaaagccaaagttccaacgatgtctttccgacggcgatgcacgttgcggcgctgctggcgctgcgcaagcaactcattccgcagcttaaaaccctgacacagacgctgagtgaaaaatcgcgtgcatttgccgatatcgtcaaaatcggtcgaacccacttgcaggacgccacgccgctaacactggggcaggagatttccggctgggtagcgatgctcgagtataatctcaaacatatcgaatacagcctgcctcacgtagcggaactggc

SEQ ID NO: 640 - DNA, 469 bp, Escherichia coli
cgagcgccattcggcaggctgcggatgaagtactggcaggacagcatgacgacgaattcccgctggctatctggcagaccggctccggcacgcaaagtaacatgaacatgaacgaagtgctggctaaccgggccagtgaattactcggcggcgtgcgcgggatggagcgtaaagttcaccctaacgacgacgtgaacaaaagccaaagttccaacgatgtctttccgacggcgatgcacgttgcggcgctgctggcgctgcgcaagcaactcattccgcagcttaaaaccctgacacagacgctgagtgaaaaatcgcgtgcatttgccgatatcgtaaaaatcggtcgaacccacttgcaggacgccacgccgctaacactggggcaggagatttccggctgggtagcgatgctcgagcataatctcaaacatatcgaatacagcctgcctcacgtagcggaactggc

SEQ ID NO: 641 - DNA, 469 bp, Escherichia coli
cgagcgccattcgtcaggcggcggatgaagtactggcaggacagcatgacgacgaattcccgctggctatctggcagaccggctccggcacgcaaagtaatatgaacatgaacgaagtgctggctaaccgggccagtgaattactcggcggcgtgcgtgggatggagcgtaaagttcatcctaacgacgacgtgaacaaaagccaaagttccaatgatgtctttccgacggcgatgcacgttgcggcgctactggcgctgcgcaagcaactcattccgcagcttaaaaccctgacacagacactgaatgagaaatcccgtgcatttgcggatatcgtcaaaatcggtcgaacccacttgcaggatgccacgccgctaacactagggcaggagatttccggctgggtagcgatgctggagcataatctcaaacatatcgaatacagcctgccgcatgtagcggaactggc

SEQ ID NO: 642 - DNA, 469 bp, Escherichia coli
cgagcgccattcgtcaggcggcggatgaagtactggcaggacagcatgacgacgaattcccgctggctatctggcagaccggctccggcacgcaaagtaacatgaacatgaacgaagtgctggctaaccgggccagtgaattactcggcggtgtgcgcgggatggaatgtaaagttcaccctaacgacgacgtgaacaaaagccaaagttccaacgatgtctttccgacggcgatgcacgttgcggcgctgctggcgctgcgcaagcaactcattcctcagcttaaaaccctgacacagacactgaatgagaaatcccgtgcttttgccgatatcgtcaaaattggtcgtactcacttgcaggatgccacgccgttaacgctggggcaggagatttccggctgggtagcgatgctcgagcataatctcaaacatatcgaatacagcctgcctcacgtagcggaactggc

SEQ ID NO: 643 - DNA, 469 bp, Escherichia coli
cgagcgccattcggcaggcggcggatgaagtactggcaggacagcatgacgacgaattcccgctggctacctggcagaccggctccggcacgcaaagtaacatgaacatgaacgaagtgctggctaaccgggccagtgaattactcggcggcgtgcgcgggatggaacgtaaagttcaccctaacgacgacgtgaacaaaagccaaagttccaacgatgtctttccgacggcgatgcacgttgcggcgctgctggcgctgcgcaagcaactcattccgcagcttaaaaccctgacacagacactgagtgaaaaatcgcgtgcatttgccgatatcgtcaaaatcggtcgaacccacttgcaggacgccacgccgctaacactagggcaggagatttccggctgggtagcgatgctcgagcataatctcaaacatatcgaatacagcctgcctcacgtagcggaactggc

SEQ ID NO: 644 - DNA, 469 bp, Escherichia coli
cgagcgccattcggcaggcggcggatgaagtactggcaggacagcatgacgacgaattcccgctggcaatctggcagaccggctccggcacgcaaagtaacatgaacatgaacgaagtgctggctaaccgggccagtgaattactcggcggcgtgcgtgggatggagcgtaaagttcaccctaacgacgacgtgaacaaaagccaaagttctaacgatgtctttccaacggcgatgcacgttgcggcgctgctggcgctgcgcaagcaactcattccgcagcttaaaaccctgacacagacgctgagtgaaaaatcccgtgcatttgccgatatcgtaaaaatcggtcgaacccacttgcaggacgccacgccgctaacactggggcaggagatttccggctgggtagcgatgctcgagcataatctcaaacatattgaatacagcctgcctcacgtagcggaactggc

SEQ ID NO: 645 - DNA, 469 bp, Escherichia coli
cgagcgccattcggcaggcggcggatgaagtactggcaggacagcatgacgacgaattcccgctggctatctggcagaccggctccggcacgcaaagtaacatgaacatgaacgaagtgctggctaaccgggccagtgaattactcggcggcgtgcgcgggatggaacgtaaagttcaccctaacgacgacgtgaacaaaagccaaagttccaacgatgtctttccgacggcgatgcacgttgcggcgctgctggcgctgcgcaagcaactcattccgcagcttaaaacgctgacacagacactgagtgaaaaatcgcgtgcatttgccgatatcgtcaaaatcggtcgaacccacttgcaggacgccacgccgctaacactagggcaggagatttccggctgggtagcgatgctcgagcataatctcaaacatatcgaatacagcctgcctcacgtagcggaactggc

SEQ ID NO: 646 - DNA, 469 bp, Escherichia coli
cgagagccattcgccaggcggcggatgaagtgctggcaggacaacatgatgatgagttcccgctggcaatctggcaaacgggatctggtacgcaaagcaatatgaatatgaatgaagtactggctaaccgggccagcgaattgcttggcggcgtacgcggaatggaacgtaaagttcaccctaacgatgacgtgaacaaaagccaaagctccaatgatgtcttcccaactgctatgcacgtggcggcgttattggcactgcgtaagcaactcattcctcagctcaaaaacctcactcaaactctgaatgagaaatcgcgcgcatttgccgatatcgtcaaaattggtcgtacccacttgcaggacgccacaccgctgaccctgggacaggagatttctggttgggtagcgatgctggagcataatctcaaacatattgaatacagcctgcctcacgtagcggaactggc

SEQ ID NO: 647 - DNA, 469 bp, Escherichia coli
cgagcgccattcggcaggcggcggatgaagtactggcaggacagcatgacgacgaattcccgctggctatctggcagaccggctccggcacgcaaagtaacatgaacatgaacgaagtgctggctaaccgggccagtgaattactcggcggcgtgcgcgggatggaacgtaaagttcaccctaacgacgacgtgaacaaaagccaaagttccaacgatgtctttccgacggcgatgcacgttgcggcgctgctggcgctgcgcaagcaactcattccgcagcttaaaaccctgacacagacgctgagtgaaaaatcgcgtgcatttgccgatatcgtaaaaatcggtcgaacccacttgcaggacgccaccccgctaacactggggcaggagatttccggctgggtagcgatgttcgagcataatctcaaacatatcgaatacagcctgcctcacgtagcggaactggc

SEQ ID NO: 648 - DNA, 469 bp, Escherichia coli
cgagcgccattcggcaggcggcggatgaagtactggcaggacagcatgacgacgaattcccgctggctatctggcagaccggctccggcacgcaaagtaacatgaacatgaacgaagtgctggctaaccgggccagtgaattactcggcggcgtgcgcgggatggaacgtaaagttcaccctaacgacgacgtgaacaaaagccaaagttccaacgatgtctttccgacggcgatgcacgttgcggcgctgctggcgctgcgcaagcaactcattccgcagcttaaaaccctgacacagacgctgagtgaaaaatcgcgtgcatttgccgatatcgtcaaaatcggtcgaacccacttgcaggacgccacgccgctaacactggggcaggagatttccggctgggtagcgatgctcgagtataatctcaaacatatcgaatacagcctgcttcacgtagcggaactggc

SEQ ID NO: 649 - DNA, 469 bp, Escherichia coli
cgagcgccattcggcaggcggcggatgaagtactggcaggacagcatgacgacgaattcccgctggctatctggcagaccggctccggcacgcaaagtaacatgaacatgaacgaagtgctggctaaccgggccagtgaattactcggcggcgtgcgcgggatggaacgtaaagttcaccctaacgacgacgtgaacaaaagccaaagttccaacgatgtctttccggcggcgatgcacgttgcggcgctgctggcgctgcgcaagcaactcattccgcagcttaaaaccctgacacagacgctgagtgaaaaatcgcgtgcatttgccgatatcgtcaaaatcggtcgaacccacttgcaggacgccacgccgctaacactagggcaggagatttccggctgggtagcgatgctcgagcataatctcaaacatatcgaatacagcctgcctcacgtagcggaactggc

SEQ ID NO: 650 - DNA, 469 bp, Escherichia coli
cgagcgccattcggcaggcggcggatgaagtactggcaggacagcatgacgacgaattcccgctggctatctggcagaccggctccggcacgcaaagtaacatgaacatgaatgaagtgctggctaaccgggccagtgaattactcggcggcgtgcgcgggatggaacgtaaagttcaccctaacgacgacgtgaacaaaagccaaagttccaacgatgtctttccgacggcgatgcacgttgcggcgctgctggcgctgcgcaagcaactcattccgcagcttaaaaccctgacacagacactgagtgaaaaatcgcgtgcatttgccgatatcgtcaaaatcggtcgaacccacttgcaggacgccacgccgctaacactagggcaggagatttccggctgggtagcgatgctcgagcataatctcaaacatatcgaatacagcctgcctcacgtagcggaactggc

SEQ ID NO: 651 - DNA, 469 bp, Escherichia coli
cgagcgccattcggcaggcggcggatgaagtactggcaggacatcatgacgacgaattcccgctggctatctggcagaccggctccggcacgcaaagtaacatgaacatgaacgaagtgctggctaaccgggccagtgaattactcggcggcgtgcgcgggatggaacgtaaagttcaccctaacgacgacgtgaacaaaagccaaagttccaacgatgtctttccgacggcgatgcacgttgcggcgctgctggcgctgcgcaagcaactcattcctcagattaaaaccctgacacagacactgaatgagaaatcccgtgcatttgccgatatcgtcaaaattggtcgtactcacttgcaggatgccacgccgttaacactggggcaggagatttccggctgggtagcgatgctcgagcataatctcaaacatatcgaatacagcctgcctcacgtagcggaactggc

SEQ ID NO: 652 - DNA, 469 bp, Escherichia coli
cgagcgccattcgtcaggcggcggatgaagtactggcaggacagcatgacgacgaattcccgctggctatctggcagaccggctccggcacgcaaagtaatatgaacatgaacgaagtgctggctaatcgggccagtgaattacttggcggcgtgcgcgggatggaacgtaaagttcaccctaacgacgacgtgaacaaaagccaaagttccaacgatgtctttccgacggcgatgcacgttgcggcgctgctggcgctgcgcaagcaactcattccgcagcttaaaaccctgacacagacgctgaatgagaaatcccgtacatttgccgatatcgtcaaaattggtcgtactcacttgcaggatgccacgccgttaacgctggggcaggagatttccggctgggtagcgatgctggagcataatctcaaacatattgaatacagcctgcctcacgtagcggaactggc

SEQ ID NO: 653 - DNA, 469 bp, Escherichia coli
cgagcgccattcgtcaggcggcggatgaagtactggcaggacagcatgacgacgaattcccgctggctatctggcagaccggctctggcacgcaaagtaacatgaacatgaacgaagtgctggctaaccgggccagtgaattactcggcggtgtgcgcgggatggaacgtaaagttcaccctaacgacgacgtgaacaaaagccaaagttccaacgatgtctttccgacggcgatgcacgttgcggcgctgctggcgctgcgcaagcaactcattcctcagcttaaaaccctgacacagacactgaatgagaaatcccgtgcttttgccgatatcgtcaaaattggtcgtactcacttgcaggatgccacgccgttaacgctggggcaggagatttccggctgggtagcgatgctcgagcataatctcaaacatatcgaatacagcctgcctcacgtagcggaactggc

SEQ ID NO: 654 - DNA, 469 bp, Escherichia coli
cgagcgccattcgtcaggcggcggatgaagtattggcaggacagcatgacgatgaattcccgctggctatctggcagaccggctccggcacgcaaagtaacatgaacatgaacgaagtgctggctaaccgggccagtgaattactcggcggcgtgcgtgggatggagcgtaaagttcaccctaacgacgacgtgaacaaaagccaaagttctaacgatgtctttccaacggcgatgcacgttgcggcgctgctggcgctgcgcaagcaactcattccgcagcttaaaaccctgacacagacactgaatgagaaatcccgtgcatttgccgatatcgtcaaaattggtcgtactcacttgcaggatgccacgccgttaacgctggggcaggagatttccggctgggtagcgatgctggagcataatctcaaacatatcgaatacagcctgcctcacgtagcggaactggc

SEQ ID NO: 655 - DNA, 469 bp, Escherichia coli
cgagcgccattcggcaggcggcggatgaagtactggcaggacagcatgacgacgaattcccgctggctatctggcagaccggctccggcacgcaaagtaacatgaacatgaacgaagtgctggctaaccaggccagtgaattactcggcggcgtgcgcgggatggaacgtaaagttcaccctaacgacgacgtgaacaaaagccaaagttccaacgatgtctttccgacggcgatgcacgttgcggcgctgctggcgctgcgcaagcaactcattccgcagcttaaaaccctgacacagacactgagtgaaaaatcgcgtgcatttgccgatatcgtcaaaatcggtcgaacccacttgcaggacgccacgccgctaacactagggcaggagatttccggctgggtagcgatgctcgagcataatctcaaacatatcgaatacagcctgcctcacgtagcggaactggc

SEQ ID NO: 656 - DNA, 469 bp, Escherichia coli
ccagcgcgattatcgaggcagctgatgaagtgctggcgggaaaacatgctgatgagtttccgctggcgatttggcagaccgggtccggtacgcaaagcaacatgaatatgaatgaagtgttagcgaaccgcgccagtgaaattttgggcggcgttcgcggtatggaacgcaaggtgcatcccaatgatgacgtcaataagagtcaaagctcaaacgatgtgttcccaaccgccatgcacgtggcggcgttactggcgttacgcgaacacctcatcccgcaattatccgcattaacggatacgcttcgcgataaatcccacgctttcgccgatattgtcaaaattggccgtactcacctgcaggacgcgacgccgctcaccttaggccaggagatttccggttgggtagccatgctggaacataacctcaggcacattgagcacagtttaccgcacgtcgcggaactggc

SEQ ID NO: 657 - DNA, 469 bp, Escherichia coli
cgagcgccattcgtcaggcggcggatgaagtactggcaggacagcatgacgacgaattcccgctggctatctggcagaccggctccggcacgcaaagtaacatgaacatgaacgaagtgctggctaacggggccagtgaattactcggcggtgtgcgcgggatggaacgtaaagttcaccctaacgacgacgtgaacaaaagccaaagttccaacgatgtctttccgacggcgatgcacgttgcggcgctgctggcgctgcgcaagcaactcattccgcagcttaaaaccctgacacagacgctgagtgaaaaatcgcgtgcatttgccgatatcgtcaaaatcggtcgaacccacttgcaggacgccaccccgctaacactggggcaggagatttccggctgggtagcgatgctcgagcataatctcaaacatatcgaatacagcctgcctcacgtagcggaactggc

SEQ ID NO: 658 - DNA, 472 bp, Escherichia coli
cgagagccattcgccaggcggcggatgaagtgctggcagggcaacatgatgatgagttcccgctggcaatctggcaaacgggatccggtacgcaaagcaatatgaatatgaatgaagtactggctaatcgggccagcgaattgcttggcggcggcgtacgcggaatggaacgtaaagttcaccctaacgatgacgtgaacaaaagccaaagctccaatgatgtcttcccaactgctatgcacgtagcggcgttattggcactgcgtaagcaactcattcctcagctcaaaaacctcactcaaactctgaatgagaaatcgcgtgcatttgccgatatcgtcaaaattggtcgtacccacttgcaggacgccacaccgctgaccctgggacaggagatttctggttgggtagcgatgctggagcataatctcaaacatattgaatacagcctgcctcacgtagcggaactggc

SEQ ID NO: 659 - DNA, 469 bp, Escherichia coli
cgagcgccattcgtcaggcggcggatgaagtactggcaggacagcatgacgacgaattcccgctggctatctggcagaccggctccggcacgcaaagtaacatgaacatgaacgaagtgctggctaaccgggccagtgaattactcggcggtgtgcgcgggatggaacgtaaagttcaccctaacgacgacgtgaacaaaagccaaagctccaacgatgtctttccgacggcgatgcacgttgcggcgctgctggcgctgcgcaagcaactcattccgcagcttaaaaccctgacacagacactgaatgagaaatcccgtgcatttgccgatatcgtcaaaattggtcgtactcacttgcaggatgccacgccgttaacgctggggcaggagatttccggctgggtagcgatgctggcgcataatctcaaacatattgaatacagcctgcctcacgtagcggaactggc

SEQ ID NO: 660 - DNA, 469 bp, Escherichia coli
cgagcgccattcgtcaggcggcggatgaagtactggcaggacagcatgacgacgaattcccgctggctatctggcagaccggctccggcacgcaaagtaacatgaacatgaacgaagtgctggctaaccgggccagtgaattactcggcggtgtgcgcgggatggaacgtaaagttcaccctaacgacgacgtgaacaaaagccaaagctccaacgatgtctttccgacggcgatgcacgttgcggcgctgctggcgctgcgcaagcaactcattccgcagcttaaaatcctgacacagacactgaatgagaaatcccgtgcatttgccgatatcgtcaaaattggtcgtactcacttgcaggatgccacgccgttaacgctggggcaggagatttccggctgggtagcgatgctggagcataatctcaaacatattgaatacagcctgcctcacgtagcggaactggc

SEQ ID NO: 661 - DNA, 469 bp, Escherichia coli
cgagcgccattcggcaggcggcggatgaagtactagcaggacagcatgacgacgaattcccgctggctatctggcagaccggctccggcacgcaaagtaacatgaacatgaacgaagtgctggctaaccgggccagtgaattactcggcggcgtgcgcgggatggaacgtaaagttcaccctaacgacgacgtgaacaaaagccaaagttccaacgatgtctttccgacggcgatgcacgttgcggcgctgctggcgctgcgcaagcaactcattccgcagcttaaaaccctgacacagacactgaatgagaaatcccgtgcatttgccgatatcgtcaaaattggtcgtactcacttgcaggatgccacgccgttaacgctggggcaggagatttccggctgggtagcgatgctcgagcataatctcaaacatatcgaatacagcctgcctcacgtagcggaactggc

SEQ ID NO: 662 - DNA, 469 bp, Escherichia coli
cgagcgccattcggcaggcggcggatgaagtactggcaggacagcatgacgacgaattcccgctggctatctggcagaccggctccggcacgcaaagtaacatgaacatgaacgaagtgctggctaaccgggccagtgaattactcggcggcgtgcgcgggatggaacgtaaagttcaccctaacgacgacgtgaacaaaagccaaagttccaacgatgtctttccgacggcgatgcacgttgcggcgctgctggcgctgcgcaagcaactcattccgcagcttaaaaccctgatacagacactgagtgaaaaatcgcgtgcatttgccgatatcgtcaaaatcggtcgaacccacttgcaggacgccacgccgctaacactagggcaggagatttccggctgggtagcgatgctcgagcataatctcaaacatatcgaatacagcctgcctcacgtagcggaactggc

SEQ ID NO: 663 - DNA, 469 bp, Escherichia coli
cgagcgccattcggcaggcggcggatgaagtactggcaggacagcatgacgatgaattcccgctggctatctggcagaccggctccggcacgcaaagtaacatgaacatgaacgaagtgctggctaaccgggccagtgaattactcggcggtgtgcgcgggatggaacgtaaagttcaccctaacgacgacgtgaacaaaagccaaagttccaacgatgtctttccgacggcgatgcacgttgcggcgctgctggcgctgcgcaagcaactcattccgcagcttaaaaccctgacacagacactgaatgagaaatcccgtgcatttgccgatatcgtcaaaattggtcgtactcacttgcaggatgccacgccgttaacactggggcaggagatttccggctgggtagcgatgctcgagcataatctcaaacatatcgaatacagcctgcctcacgtagcggaactggc

SEQ ID NO: 664 - DNA, 469 bp, Escherichia coli
cgagcgccattcggcaggcggcggatgaagtactggcaggacagcatgacgacgaattcccgctggctatctggcagactggctccggcacgcaaagtaacatgaacatgaacgaagtgctggctaaccgggccagtgaattactcggcggcgtgcgcgggatggaacgtaaagttcaccctaacgacgacgtgaacaaaagccaaagttccaacgatgtctttccgacggcgatgcacgttgcggcgctgctggcgctgcgcaagcaactcattccgcagcttaaaaccctgacacagacactgagtgaaaaatcgcgtgcatttgccgatatcgtcaaaatcggtcgaacccacttgcaggacgccacgccgctaacactagggcaggagatttccggctgggtagcgatgctcgagcataatctcaaacatatcgaatacagcctgcctcacgtagcggaactggc

SEQ ID NO: 665 - DNA, 469 bp, Escherichia coli
cgagcgccattcggcaggcggcggatgaagtactggcaggacagcatgacgatgaattcccgctggctatctggcagaccggctccggcacgcaaagtaacatgaacatgaacgaagtgctggctaaccgggccagtgaattactcggcggcgtgcgcgggatggaacgtaaagttcaccctaacgacgacgtgaacaaaagccaaagttccaacgatgtctttccgacggcgatgcacgttgcggcgctgctggcgctgcgcaagcaactcattccgcagcttaaaaccctgacacagacgctgagtgaaaaatcgcgtgcatttgccgatatcgtcaaaatcggtcgaacccacttgcaggacgccacgccgctaacactggggcaggagatttccggctgggtagcgatgctcgagtataatctcaaacatatcgaatacagcctgcctcacgtagcggaactggc

SEQ ID NO: 666 - DNA, 469 bp, Escherichia coli
cgagcgccattcgtcaggcggcggatgaagtactggcaggacagcatgacgacgaattcccgctggctatctggcagaccggctccggcacgcaaagtaacatgaacatgaacgaagtgctggctaaccgggccagtgaattactcggcggtgtgcgcgggatggaacgtaaggttcaccctaacgacgacgtgaacaaaagccaaagttccaacgatgtctttccgacggcgatgcacgttgcggcgctgctggcgctgcgcaagcaactcattcctcagcttaaaaccctgacacagacactgaatgagaaatcccgtgcttttgccgatatcgtcaaaattggtcgtactcacttgcaggatgccacgccgttaacgctggggcaggagatttccggctgggtagcgatgctcgagcataatctcaaacatatcgaatacagcctgcctcacgtagcggaactggc

SEQ ID NO: 667 - DNA, 469 bp, Escherichia coli
cgagcgccattcggcaggcggcggatgaagtactggcaggacagcatgacgacgaattcccgctggctatctggcagaccggctccggcacgcaaagtaacatgaacatgaacgaagtgctggctaaccgggccagtgaattactcggcggtgtgcgcgggatggaacgtaaagttcaccctaacgatgacgtgaacaaaagccaaagttccaacgatgtctttccgacggcgatgcacgttgcggcgctgctggcgctgcgcaagcaactcattccgcagcttaaaaccctgacacagacgctgagtgaaaaatcgcgtgcatttgccgatatcgtaaaaatcggtcgaacccacttgcaggatgccaccccgctaacactggggcaggagatttccggctgggtagcgatgctcgagcataatctcaaacatatcgaatacagcctgcctcacgtagcggaactggc

SEQ ID NO: 668 - DNA, 470 bp, Escherichia coli
cgagcgccattcggcaggcggcggatgaagtactggcaggacagcatgacgacgaattcccgctggctatctggcagaccggctccggcacgcaaagtaacatgaacatgaacgaagtgctggctaaccgggccagtgaattactcggcggcgtgcgcgggatggaacgtaaagttcaccctaacgacgacgtgaacaaaagccaaagttccaacgatgtctttccgacggcgatgcacgttgcggcgctgctggcgctgcgcaagcaactcattccgcagcttaaaaccctgaaacagacgctgagtgaaaaatcgcgtgcatttgccgatatcgtcaaaatcggtcgaacccacttgcaggacgccacgccgctaacactggggcaggagatttccggctgggtagcgatgctcgagtataatctcaaacatatcgaatacagcctgcctcacgtagcggaactggca

SEQ ID NO: 669 - DNA, 469 bp, Escherichia coli
cgagcgccattcggcaggcggcggatgaagtactggcaggacagcatgacgacgaattcccgctggctatctggcagaccggctccggtacgcaaagtaacatgaacatgaacgaagtgctggctaaccgggccagtgaattactcggcggcgtgcgcgggatggaacgtaaagttcaccctaacgacgacgtgaacaaaagccaaagttccaacgatgtctttccgacggcgatgcacgttgcggcgctgctggcgctgcgcaagcaactcattccgcagcttaaaaccctgacacagacgctgagtgaaaaatcgcgtgcatttgccgatatcgtcaaaatcggtcgaacccacttgcaggacgccacgccgctaacactggggcaggagatttccggctgggtagcgatgctcgagtataatctcaaacatatcgaatacagcctgcctcacgtagcggaactggc

SEQ ID NO: 670 - DNA, 469 bp, Escherichia coli
cgagcgccattcgtcaggcggcggatgaagtactggcaggacagcatgacgacgaattcccgctggctatctggcagaccggctccggcacgcaaagtaacatgaacatgaacgaagtgctggctaaccgggccagtgaattactcggcggcgtgcgcgggatggaacgtaaagttcaccctaacgacgacgtgaacaaaagccaaagttccaacgatgtctttccgacggcgatgcacgttgcggcgctgctggcgctgcgcaagcaactcattccgcagcttaaaaccctgacacagacactgagtgaaaaatcgcgtgcgtttgccgatatcgtaaaaatcggtcgaacccacttgcaggacgccacgccgctaacactggggcaggagatttccggctgggtagcgatgctcgagcataatctcaaacatatcgaatacagcctgcctcacgtagcggaactggc

SEQ ID NO: 671 - DNA, 469 bp, Escherichia coli
cgagcgccattcggcaggcggcggatgaagtactggcaggacagcatgacgacgaattcccgctggctatctggcagaccggctccggcacgcaaagtaacatgaacatgaacgaagtgctggctaaccgggccagtgaattactcggcggcgtgcgcgggatggaacgtaaagttcaccctaacgacgacgtgaacaaaagccaaagttccaatgatgtctttccgacggcgatgcacgttgcggcgctgctggcgctgcgcaagcaactcattccgcagcttaaaaccctgacacagacgctgagtgaaaaatcgcgtgcatttgccgatatcgtcaaaatcggtcgaacccacttgcaggacgccacgccgctaacactagggcaggagatttccggctgggtagcgatgctcgagcataatctcaaacatatcgaatacagcctgcctcacgtagcggaactggc

SEQ ID NO: 672 - DNA, 469 bp, Escherichia coli
cgagcgccattcgtcaggcggcggatgaagtactggcaggacagcatgacgacgaattcccgctggctatctggcagaccggctccggcacgcaaagtaatatgaacatgaacgaagtgctggctaatcgggccagtgaattactcggcggtgtgcgcgggatggaacgtaaagttcaccctaacgacgacgtgaacaaaagccaaagttccaatgatgtctttccgacggcgatgcacgttgcggcgctactggcgctgcgcaagcaactcattccgcagcttaaaaccctgacacagacactgaatgagaaatcccgtgcatttgccgatatcgtcaaaattggtcgtactcacttgcaggatgccacgccgttaacgctggggcaggagatttccggctgggtagcgatgctggagcataatctcaaacatattgaatacagcctgcctcacgtagcggaactggc

SEQ ID NO: 673 - DNA, 460 bp, Escherichia coli
cgagcgccattcgtcaggcggcggatgaagtactggcaggacagcatgacgacgaattcccgctggctatctggcagaccggctccggcacgcaaagtaacatgaacatgaacgaagtgctggctaaccgggccagtgaattactcggcggtgtgcgcgggatggaacgtaaagttcaccctaacgacgacgtgaacaaaagccaaagctccaacgatgtctttccgacggcgatgcacgttgcggcgctgcgcaagcaactcattccgcagcttaaaaccctgacacagacactgaatgagaaatcccgtgcatttgccgatatcgtcaaaattggtcgtactcacttgcaggatgccacgccgttaacgctggggcaggagatttccggctgggtagcgatgctggagcataatctcaaacatattgaatacagcctgcctcacgtagcggaactggc

SEQ ID NO: 674 - DNA, 463 bp, Escherichia coli
cgagcgccattcggcaggcggcggatgaagtactggcaggacagcatgacgacgaattcccgttggctatctggcagaccggctccggcacgcaaagtaacatgaacgaagtgctggctaaccgggccagtgaattactcggcggcgtgcgcgggatggaacgtaaagttcaccctaacgacgacgtgaacaaaagccaaagttccaacgatgtctttccgacggcgatgcacgttgcggcgctgctggcgctgcgcaagcaactcattccacaacttaaaaccctgacccagacgctgagtgaaaaatcccgcgcatttgccgatatcgtcaaaatcggtcgtacccacttgcaggacgccacgccgttaacgctggggcaggagatttccggctgggtagcgatgctggagcataatctcaaacatatcgaatacagcctgcctcacgtagcggaactggc

SEQ ID NO: 675 - DNA, 469 bp, Escherichia coli
cgagcgccattcggcaggcggcggatgaagtactggcaggacagcatgacgacgaattcccgctggctatctggcagaccggctccggcacgcaaagtaacatgaacatgaacgaagtgctggctaaccgggccagtgaattactcggcggcgtgcgcgggatggaacgtaaagttcaccctaatgacgacgtgaacaaaagccaaagttccaacgatgtctttccgacggcgatgcacgttgcggcgctgctggcgctgcgcaagcaactcattccgcagcttaaaaccctgacacagacactgaatgagaaatcccgtgcatttgccgatatcgtcaaaattggtcgtactcacttgcaggatgccacgccgttaacactggggcaggagatttccggctgggtagcgatgctcgagcataatctcaaacatatcgaatacagcctgcctcacgtagcggaactggc

SEQ ID NO: 676 - DNA, 469 bp, Escherichia coli
cgagtgccattcgtcaggcggcagatgaagtgctggcgggacagcatgacgatgaatttccgctggctatctggcagaccggttccggtacgcaaagcaatatgaatatgaacgaagtgctggctaaccgggcgagcgaattgcttggcggcgtgcgtgggatggaacgtaaagttcaccctaatgacgacgtgaacaaaagccaaagttccaatgatgtctttccgacggcgatgcatgttgcggcgctgctggcgctgcgcaagcaactcattccgcagcttaaaacactgacacaaacgctgagtgaaaaatcgcgcgcatttgccgatatcgtcaaaattggtcgtacccacttgcaggacgccacgccgctgacgctggggcaggagatttctggctgggtagcgatgctggagcataatctcaaacatatcgagtacagtctgccgcacgtggcggaactggc

SEQ ID NO: 677 - DNA, 469 bp, Escherichia coli
cgagcgccattcggcaggcggcggatgaagtactggcaggacagcatgacgacgaattcccgctggctatctggcagaccggctccggcacgcaaagtaacatgaacatgaacgaagtgctggctaaccgggccagtgaattactcggcggcgtgcgcgggatggaacgtaaagttcaccctaacgacgacgtgaacaaaagccaaagttccaacgatgtctttccgacggcgatgcacgttgcggcgctgctggcgctgcgcaagcaactcattcctcagcttaaaaccctgacacagacgctgaatgagaaatcccgtgcatttgccgatatcgtcaaaattggtcgtactcacttgcaggatgccacgccgttaacactggggcaggagatttccggctgggtagcgatgctcgagcataatctcaaacatatcgaatacagcctgcctcacgtagcggaactggc

SEQ ID NO: 678 - DNA, 469 bp, Escherichia coli
cgagcgccattcggcaggcggcggatgaagtactggcaggacagcatgacgacgaattcccgctggctatctggcagaccggctccggcacgcaaagtaacatgaacatgaacgaagtgctggctaaccgggcaagtgaattactcggcggcgtgcgcgggatggaacgtaaagttcaccctaacgacgacgtgaacaaaagccaaagttccaacgatgtctttccgacggcgatgcacgttgcggcgctgctggcgctgcgcaagcaactcattccgcagcttaaaaccctgacacagacgctgagtgaaaaatcgcgtgcatttgccgatatcgtcaaaatcggtcgaacccacttgcaggacgccacgccgctaacactagggcaggagatttccggctgggtagcgatgctcgagcataatctcaaacatatcgaatacagcctgcctcacgtagcggaactggc

SEQ ID NO: 679 - DNA, 469 bp, Escherichia coli
cgagcgccattcggcaggcggcggatgaagtactggcaggacagcatgacgacgaattcccgctggctatctggcagaccggctccggcacgcaaagtaacatgaacatgaacgaagtgctggctaaccgggccagtgaattactcggcggcgtgcgcgggatggaacgtaaagttcaccctaacgacgacgtgaacaaaagccaaagttccaacgatgtctttccgacggcgatgcacgttgcggcgctgctggcgctgcgcaagcaactcattccgcagcttaaaaccctgacacagacactgagtgaaaaatcgcgtgcatttgccgatatcgtcaaaatcggtcgaacccacttgcaggacgccacgccgctaacactagggcaggagatttccggctgggtagcgatgctcgagcataatctccaacatatcgaatacagcctgcctcacgtagcggaactggc

SEQ ID NO: 680 - DNA, 469 bp, Escherichia coli
cgagcgccattcggcaggcggcggatgaagtactggcaggacagcatgacgacgaattcccgctggctatctggcagaccggctccggcacgcaaagtaacatgaacatgaacgaagtgctggctaaccgggccagtgaattactcggcggcgtgcgcgggatggaacgtaaagttcaccctaacgacggcgtgaacaaaagccaaagttccaacgatgtctttccgacggcgatgcacgttgcggcgctgctggcgctgcgcaagcaactcattccgcagcttaaaaccctgacacagacactgagtgaaaaatcgcgtgcatttgccgatatcgtcaaaatcggtcgaacccacttgcaggacgccacgccgctaacactagggcaggagatttccggctgggtagcgatgctcgagcataatctcaaacatatcgaatacagcctgcctcacgtagcggaactggc

SEQ ID NO: 681 - DNA, 469 bp, Escherichia coli
cgagcgccattcggcaggcggcggatgaagtactggcaggacagcatgacgacgaattcccgctggctatctggcagaccggctccggcacgcaaagtaacatgaacatgaacgaagtgctggctaaccgggccagtgaattactcggcggcgtgcgcgggatggaacgtaaagttcaccctaacgacggcgtgaacaaaagccaaagttccaacgatgtctttccgacggcgatgcacgttgcggcgctgctggcgctgcgcaagcaacttattccgcagcttaaaaccctgacacagacactgagtgaaaaatcgcgtgcatttgccgatatcgtcaaaatcggtcgaacccacttgcaggacgccacgccgctaacactagggcaggagatttccggctgggtagcgatgctcgagcataatctcaaacatatcgaatacagcctgcctcacgtagcggaactggc

SEQ ID NO: 682 - DNA, 469 bp, Escherichia coli
cgagcgccattcgtcaggcggcggatgaagtactggcaggacagcatggcgacgaattcccgctggctatctggcagaccggctccggcacgcaaagtaacatgaacatgaacgaagtgctggctaaccgggccagtgaattactcggcggtgtgcgcgggatggaacgtaaagttcaccctaacgacgacgtgaacaaaagccaaagttccaacgatgtctttccgacggcgatgcacgttgcggcgctgctggcgctgcgcaagcaactcattcctcagcttaaaaccctgacacagacactgaatgagaaatcccgtgcttttgccgatatcgtcaaaattggtcgtactcacttgcaggatgccacgccgttaacgctggggcaggagatttccggctgggtagcgatgctcgagcataatctcaaacatatcgaatacagcctgcctcacgtagcggaactggc

SEQ ID NO: 683 - DNA, 469 bp, Escherichia coli
cgagcgccattcggcaggcggcggatgaagtactggcaggacagcatgacgacgaattcccgcttgctatctggcagaccggctccggcacgcaaagtaacatgaacatgaacgaagtgcttgctaaccgcgccagtgaattactcggcggcgtgcgtgggatggagcgtaaagttcaccctaacgacgacgtgaacaaaagccaaagttctaacgatgtctttccaacggcgatgcacgttgcggcgctgctggcgctgcgcaagcaactcattccgcagcttaaaaccctgacacagacactgaatgagaaatcccgtgcatttgccgatatcgtaaaaatcggtcgaacccacttgcaggacgccacgccgctaacactggggcaggagatttccggctgggtagcgatgctggagcataatctcaaacatattgaatacagcctgcctcacgtagcggaactggc

SEQ ID NO: 684 - DNA, 469 bp, Escherichia coli
cgagcgccattcggcaggcggcggatgaagtactggcaggacagcatgacgacgaattcccgctggctatctggcagaccggctccggcacgcaaagtaacatgaacatgaatgaagtgctggctaaccgggctagtgaattactcggcggcgtgcgcgggatggaacgtaaagttcaccctaacgacgacgtgaacaaaagccaaagttccaacgatgtctttccgacggcgatgcacgttgcggcgctgctggcgctgcgcaagcaactcattccgcagcttaaaaccctgacacagacgctgagtgaaaaatcgcgtgcatttgccgatatcgtaaaaatcggtcgaacccacttgcaggacgccaccccgctaacactggggcaggagatttccggctgggtagcgatgctcgagcataatctcaaacatatcgaatacagcctgcctcacgtagcggaactggc

SEQ ID NO: 685 - DNA, 469 bp, Escherichia coli
cgagcgccattcggcaggcggcggatgaagtactggcaggacagcatgacgacgaattcccgctggctatctggcagaccggctccggcatgcaaagtaacatgaacatgaacgaagtgctggctaaccgggccagtgaattactcggcggcgtgcgcgggatggaacgtaaagttcaccctaacgacgacgtgaacaaaagccaaagttccaacgatgtctttccgacggcgatgcacgttgcggcgctgctggcgctgcgcaagcaactcattcctcagcttaaaaccctgacacagacgctgaatgagaaatcccgtgcatttgccgatatcgtcaaaattggtcgtactcacttgcaggatgccacgccgttaacactggggcaggagatttccggctgggtagcgatgctcgagcataatctcaaacatatcgaatacagcctgcctcacgtagcggaactggc

SEQ ID NO: 686 - DNA, 469 bp, Escherichia coli
cgagcgccattcggcaggcggcggatgaagtactggcaggacagcatgacgacgaattcccgctggctatctggcagaccggctccggcacgcaaagtaacatgaacatgaatgaagtgctggctaaccgggccagtgaattactcggcggcgtgcgcgggatggaacgtaaagttcaccctaacgacgacgtgaacaaaagccaaagttccaacgatgtctttccgacggcgatgcacgttgcggcgctgctggcgctgcgcaagcaactcattccgcagcttaaaaccctgacacagacgctgagtgaaaaatcgcgtgcatttgccgatatcgtaaaaatcggtcgaacccacttgcaggacgccaccccgctaacactggggcaggagatttccggctgggtagcgatgctcgagcataatctcaaacatatcgaatacagtctgcctcacgtagcggaactggc

SEQ ID NO: 687 - DNA, 469 bp, Escherichia coli
cgagcgccattcggcaggcggtggatgaagtactggcaggacagcatgacgacgaattcccgctggctatctggcagaccggctccggcacgcaaagtaacatgaatatgaacgaagtgctggctaaccgggccagtgaattactcggtggcgtgcgcgggatggaacgtaaagttcaccctaacgacgacgtgaacaaaagccaaagttccaacgatgtctttccgacggcgatgcacgttgcggcactactggcgctgcgcaagcaactcattccacaacttaaaaccctgacccagacgctgagtgaaaaatcccgcgcatttgctgatatcgtcaaaatcggtcgtacccacttgcaggacgccacgccgttaacgctggggcaggagatttccggctgggtagcgatgctggagcataatctcaaacatatcgaatacagcctgcctcacgtagcggaactggc

SEQ ID NO: 688 - DNA, 469 bp, Escherichia coli
cgagcgccattcgtcaggcggcggatgaagtactggcaggacagcatgacgacgaattcccgctggctatctggcagaccggctccggcacgcaaagtaacatgaacatgaacgaagtgctggctaaccgggccagtgaattactcggcggcgtgcgcgggatggaacgtaaagttcaccctaacgacgacgtgaacaaaagccaaagttccaacgatgtctttccgacggcgatgcacgttgcggcgctgctggcgctgcgcaagcaactcattccgcagcttaaacccctgacacagacgctgagtgaaaaatcgcgtgcatttgccgatatcgtaaaaatcggtcgaacccacttgcaggacgccacgccgctaacactggggcaggagatttccggctgggtagcgatgctcgagcataatctcaaacatatcgaatacagcctgcctcacgtagcggaactggc

SEQ ID NO: 689 - DNA, 469 bp, Escherichia coli
cgagcgccattcgtcaggcggcggatgaagtactggcaggacagcatgacgacgaattcccgctggctatctggcagaccggctccggcacgcaaagtaacatgaacatgaacgaagtgctggctaaccgggccagtgaattactcggcggtgtgcgcgggatggaacgtaaagttcaccctaacgacgacgtgaacaaaagccaaagttccaacgatgtctttccgacggcgatgcacgttgcggcgctgctggcgctgcgcaagcaactcattcctcagcttaaaaccctgacacagacactgaatgagaaatcccgtgcttttgccgatatcgtcaaaattggtcgtactcacttgcaggatgccacgccgttaacgctggggcaggagatttccggctgggtagcgatgctcgaacataatctcaaacatatcgaatacagcctgcctcacgtagcggaactggc

SEQ ID NO: 690 - DNA, 469 bp, Escherichia coli
cgagcgccattcggcaggcggcggatgaagtactggcaggacagcatgacgacgaattcccattggctatctggcagaccggctccggcacgcaaagtaacatgaacatgaacgaagtgctggctaaccgggccagtgaattactcggcggcgtgcgtgggatggagcgtaaagttcaccctaacgacgacgtgaacaaaagccaaagttctaacgatgtctttccaacggcgatgcacgttgcggcgctgctggcgctgcgcaagcaactcattccgcagcttaaaaccctgacacagacgctgagtgaaaaatcgcgtgcatttgccgatatcgtaaaaatcggtcgaacccacttgcaggacgccacgccgctaacactggggcaggagatttccggctgggtagcgatgctcgagcataatctcaaacatattgaatacagcctgcctcacgtagcggaactggc

SEQ ID NO: 691 - DNA, 469 bp, Escherichia coli
cgagcgccattcgtcaggcggcggatgaagtactggcaggacagcatgacgacgaattcccgctggctatctggcagaccggctccggcacgcaaagtaacatgaacatgaacgaagtgctggctaaccgggccagtgaattactcggcggtgtgcgcgggatggaacgtaaagttcaccctaacgacgacgtgaacaaaagccaaagttccaacgatgtctttccgacggcgatgcacgttgcggcgctgctggcgctgcgcaagcaactcattccgcagcttaaaaccctgacacagacgctgagtgaaaaatcgcgtgcatttgccgatatcgtcaaaattggtcgtactcacttgcaggatgccacgccgttaacgctggggcaggagatttccggctgggtagcgatgctcgagcataatctcaaacatatcgaatacagcctgcctcacgtagcggaactggc

SEQ ID NO: 692 - DNA, 469 bp, Escherichia coli
cgagagctattcgccaggcggcggatgaagtgctggcagggcaacatgatgatgagttcccgctggcaatctggcaaacgggatctggtacgcaaagcaatatgaatatgaatgaagtactggctaaccgggccagcgaattgcttggcggcgtacgcggaatggaacgtaaagttcaccctaacgatgacgtgaacaaaagccaaagctccaatgatgtcttcccaactgctatgcacgtggcggcgttattggcactgcgtaagcaactcattcctcagctcaaaaacctcactcaaactctgaatgagaaatcgcgcgcatttgccgatatcgtcaaaattggtcgtacccacttgcaggacgccacaccgctgactctgggacaggagatttctggttgggtagcgatgctggagcataatatcaaacatattgaatacagcctgcctcacgtagcggaactggc

SEQ ID NO: 693 - DNA, 469 bp, Escherichia coli
cgagcgccattcggcaggcggcggatgaagtactggtaggacagcatgacgacgaattcccgctggctatctggcagaccggctccggcacgcaaagtaacatgaacatgaacgaagtgctggctaaccgggccagtgaattactcggcggcgtgcgcgggatggaacgtaaagttcaccctaacgacgacgtgaacaaaagccaaagttccaacgatgtctttccgacggcgatgcacgttgcggcgctgctggcgctgcgcaagcaactcattccgcagcttaaaaccctgacacagacactgagtgaaaaatcgcgtgcatttgccgatatcgtcaaaatcggtcgaacccacttgcaggacgccacgccgctaacactagggcaggagatttccggctgggtagcgatgctcgagcataatctcaaacatatcgaatacagcctgcctcacgtagcggaactggc

SEQ ID NO: 694 - DNA, 469 bp, Escherichia coli
cgagcgccattcgtcaggcggcggatgaagtactggcaggacagcatgacgacgaattcccgctggctatctggcagaccggctccggcacgcaaagtaacatgaacatgaacgaagtgctggctaaccgggccagtgaattactcggcggtgtgcgcgggatggaacgtaaagttcaccctaacgacgacgtgaacaaaagccaaagttccaacgatgtctttccgacggcgatgcacgttgcggcgctgctggcgctgcgcaagcaactcattcctcagcttaaaaccctgacacagacactgaatgagaaatcccgtgcttttgccgatatcgtcaaaattggtcgtactcacttgcaggatgccacgccgttaacgctagggcaggagatttccggctgggtagcgatgctcgagcataatctcaaacatatcgaatacagcctgcctcacgtagcggaactggc

SEQ ID NO: 695 - DNA, 469 bp, Escherichia coli
cgagcgccattcgtcaggctgcggatgaagtgctggcggggcagcatgatgatgaattcccgctggcaatctggcagaccggttctggcacacaaagtaacatgaacatgaacgaagtgctggccaatcgggcgagtgaactgctcggcggcgtgcgcgggatggaacgtaaagttcaccctaacgacgacgtgaacaaaagccaaagttccaacgatgtctttccgacggcgatgcacgttgctgcgctgctggcgctgcgcaagcaactcattccgcagcttaaaaccctgacacagacgctgagtgaaaaatcgcgtgcatttgccgatatcgtaaaaatcggtcgaacccacttgcaggacgccaccccgctaacactggggcaggagatttccggctgggtagcgatgctcgagcataatcttaaacatatcgaatacagcctgcctcacgtagcggaactggc

SEQ ID NO: 696 - DNA, 469 bp, Escherichia coli
cgagagccattcgccaggcggcggatgaagtgctggcagggcaacatgatgatgagttcccgctggcaatctggcaaacgggatctggtacgcaaagcaatatgaatatgaatgaagtactggctaaccgggccagcgaattgcttggcggcgtacgcggaatggaacgtaaagttcaccccaacgatgacgtgaacaaaagccaaagctccaatgatgtcttcccaactgctatgcacgtggcggcgttattggcactgcgtaagcaactcattcctcagctcaaaaacctcactcaaactctgaatgagaaatcgcgtgcatttgccgatatcgtcaaaattggtcgtacccacttgcaggacgccacaccgctgaccctgggacaggagatttctggttgggtagcgatgctggagcataatctcaaacatattgaatacagcctgcctcacgtagcggaactggc

SEQ ID NO: 697 - DNA, 469 bp, Escherichia coli
cgagagccattcgccaggcggcggatgaagtgctggcagggcaacatgatgatgagttcccgctggcaatctggcaaacgggatccggtacgcaaagcaatatgaatatgaatgaagtactggctaatcgggccagcgaattgcttggcggtgtacgcggaatggaacgtaaagttcaccctaacgatgacgtgaacaaaagccaaagctccaatgatgtcttcccaactgctatgcacgtagcggcgttattggcactgcgtaagcaactcattcctcagctcaaaaacctcactcaaactctgaatgagaaatcgcgcgcatttgccgatatcgtcaaaattggtcgtacccacttgcaggacgccacaccgctgaccctgggacaggagatttctggttgggtagcgatgctggagcataatctcaaacatattgaatacagcctgtctcacgtagcggaactggc

SEQ ID NO: 698 - DNA, 469 bp, Escherichia coli
cgagcgccattcggcaggcggcggatgaagtactggcaggacagcatgacgacgaattcccgctggctatctggcagaccggctccggcacgcaaagtaacatgaacatgaacgaagtgctggctaaccgggccagtgaattactcggcggtgtgcgcgggatggaacgtaaagttcaccctaacgatgacgtgaacaaaagccaaagttccaacgatgtctttccgacggcgatgcacgttgcggcgctgctggcgctgtgcaagcaactcattccgcagcttaaaaccctgacacagacgctgagtgaaaaatcgcgtgcatttgccgatatcgtaaaaatcggtcgaacccacttgcaggatgccaccccgctaacactggggcaggagatttccggctgggtagcgatgctcgagcataatctcaaacatatcgaatacagcctgcctcacgtagcggaactggc

SEQ ID NO: 699 - DNA, 469 bp, Escherichia coli
cgagcgccattcgtcaggcggcggatgaagtactggcaggacagcatgacgatgaattcccgcttgctatctggcagaccggctccggcacgcaaagtaatatgaacatgaacgaagtgctggctaatcgggccagtgaattacttggcggcgtacgcgggatggagcgtaaagttcatcctaacgacgacgtgaacaaaagccaaagttccaatgatgtctttccgacggcgatgcacgttgcggcgctgctggcgctgcgcaagcaactcattccgcagcttaaaaccctgacacagacgctgagtgaaaaatcgcgcgcatttgccgatatcgtcaaaatcggtcgaacccacttgcaggatgccacgccgctaacactggggcaggagatttccggctgggtagcgatgctcgagcataatctcaaacatatcgaatacagcctgccgcatgtagcggaactggc

SEQ ID NO: 700 - DNA, 469 bp, Escherichia coli
cgagcgccattcgtcaggcggcggatgaagtactggcaggacagcatgacgatgaattcccgctggcaatctggcagaccggctccggcacgcaaagtaacatgaacatgaacgaagtgctggctaaccgggccagtgaattactcggcggcgtgcgtgggatggagcgtaaagttcaccctaacgacgacgtgaacaaaagccaaagttctaacgatgtctttccaacggcgatgcacgttgcggcgctgctggcgctgcgcaagcaactcattccgcagcttaaaaccctgacacagacgctgagtgaaaaatcgcgtgcatttgccgatatcgtcaaaatcggtcgaacccacttgcaggacgccacgccgctaacactggggcaggagatttccggctgggtagcgatgctcgagcataatctcaaacatattgaatacagcctgcctcacgtagcggaactggc

SEQ ID NO: 701 - DNA, 469 bp, Escherichia coli
cgagcgccattcggcaggcggcggatgaagtactggcaggacagcatgacgacgaattcccgctggctatctggcagaccggctccggcacgcaaagtaacatgaacatgaacgaagtgctggctaaccgggccagtgaattactcggtggcgtgcgcggaatggaacgtaaagttcaccctaacgacgacgtgaacaaaagccaaagttccaacgatgtctttccgacggcgatgcacgttgcggcactactggcgctgcgcaagcaactcattccacaacttaaaaccctgacccagacgctgagtgaaaaatcccgcgcatttgccgatatcgtcaaaatcggtcgtacccacttgcaggacgccacgccgttaacgctggggcaggagatttccggctgggtagcgatgctggagcataatctcaaacatatcgaatacagcctgcctcacgtagcggaactggc

SEQ ID NO: 702 - DNA, 469 bp, Escherichia coli
cgagcgccattcgtcaggcggcggatgaagtactggcaggacagcatgacgacgaattcccgctggctatctggcagaccggctccggcacgcaaagtaacatgaacatgaacgaagtgctggctaaccgggccagtgaattactcggcggtgtgcgcgggatggaacgtaaagttcaccctaacaacgacgtgaacaaaagccaaagttccaacgatgtctttccgacggcgatgcacgttgcggcgctgctggcgctgcgcaagcaactcattcctcagcttaaaaccctgacacagacactgaatgagaaatcccgtgcttttgccgatatcgtcaaaattggtcgtactcacttgcaggatgccacgccgttaacgctggggcaggagatttccggctgggtagcgatgctcgagcataatctcaaacatatcgaatacagcctgcctcacgtagcggaactggc

SEQ ID NO: 703 - DNA, 469 bp, Escherichia coli
cgagcgccattcgtcaggcggcggatgaagtactggcaggacagcatgacgacgaattcccgctggctatctggcagaccggctccggcacgcaaagtaacatgaacatgaacgaagtgttggctaaccgggccagtgaattactcggcggtgtgcgcgggatggaacgtaaagttcaccctaacgacgacgtgaacaaaagccaaagttccaacgatgtctttccgacggcgatgcacgttgcggcgctgctggcgctgcgcaagcaactcattccgcagcttaaaaccctgacacagacgctgagtgaaaaatcgcgtgcatttgccgatatcgtcaaaatcggtcgaacccacttgcaggatgccacgccgctaacactggggcaggagatttccggctgggtagcgatgctggagcataatctcaaacatatcgaatacagcctgccgcatgtagcggaactggc

SEQ ID NO: 704 - DNA, 469 bp, Escherichia coli
cgagcgccattcggcaggcggcggatgaagtactggcaggacagcatgacgacgaattcccattggctatctggcagaccggctccggcacgcaaagtaacatgaacatgaacgaagtgctggctaaccgggccagtgaattactcggcggcgtgcgtgggatggagcgtaaagttcaccctaacgacgacgtgaacaaaagccaaagttctaacgatgtctttccaacggcgatgcacgttgcggcgctgctggcgctgcgcaagcaactcattccgcagcttaaaaccatgacacagacgctgagtgaaaaatcccgtgcatttgccgatatcgtaaaaatcggtcgaacccacttgcaggacgccacgccgctaacactggggcaggagatttccggctgggtagcgatgctcgagcataatctcaaacatattgaatacagcctgcctcacgtagcggaactggc

SEQ ID NO: 705 - DNA, 469 bp, Escherichia coli
cgagcgccattcggcaggcggcggatgaagtactggcaggacagcatgacgacgaattcccgctggctatctggcagaccggctccggcacgcaaagtaacatgaacatgaacgaagtgctggctaaccgggccagtgaattactcggcggcgtgcgcgggatggaacgtaaagttcaccctaacgacgacgtgaacaaaagccaaagttccaacgatgtctttccgacggcgatgcacgttgcggcgctgctggcgctgcgcaagcaactcattccgcagcttaaaaccctgacacagacactgagtgaaaaatcgcgtgaatttgccgatatcgtcaaaatcggtcgaacccacttgcaggacgccacgccgctaacactagggcaggagatttccggctgggtagcgatgctcgagcataatctcaaacatatcgaatacagcctgcctcacgtagcggaactggc

SEQ ID NO: 706 - DNA, 469 bp, Escherichia coli
cgagcgccattcggcaggcggcggatgaagtactggcaggacagcatgacgacgaattcccgctgactatctggcagaccggctccggcacgcaaagtaacatgaacatgaacgaagtgctggctaaccgggccagtgaattactcggcggcgtgcgcgggatggaacgtaaagttcaccctaacgacgacgtgaacaaaagccaaagttccaacgatgtctttccgacggcgatgcacgttgcggcgctgctggcgctgcgcaagcaactcattccgcagcttaaaaccctgacacagacactgagtgaaaaatcgcgtgcatttgccgatatcgtcaaaatcggtcgaacccacttgcaggacgccacgccgctaacactagggcaggagatttccggctgggtagcgatgctcgagcataatctcaaacatatcgaatacagcctgcctcacgtagcggaactggc

SEQ ID NO: 707 - DNA, 469 bp, Escherichia coli
cgagcgccattcgtcaggcggcggatgaagtactggcaggacagcatgacgacgaattcccgctggctatctggcagaccggctccggcacgcaaagtaacatgaacatgaacgaagtgctggctaaccgggccagtgaattactcggcggtgtgcgcgggatggaacgtaaagttcaccctaacgacgacgtgaacaaaagccaaagttccaacgatgtctttccgacggcgatgcacgttgcggcgctgctggcgctgcgcaagcaactcattcctcagcttaaaaccctgacacagacactgaatgagaaatcccgtgcctttgccgatatcgtcaaaattggtcgtactcacttgcaggatgccacgccgttaacgctggggcaggagatttccggctgggtagcgatgctcgagcataatctcaaacatatcgaatacagcctgcctcacgtagcggaactggc

SEQ ID NO: 708 - DNA, 469 bp, Escherichia coli
cgagcgccattcggcaggcggcggatgaagtactggcaggacagcatgacgacgaattcccgctggctatctggcagaccggctccggcacgcaaagtaacatgaacatgaacgaagtgttggctaaccgggccagtgaattactcggcggcgtgcgcgggatggaacgtaaagttcaccctaacgacgacgtgaacaaaagccaaagttccaacgatgtctttccgacggcgatgcacgttgcggcactactggcgctgcgcaagcaactcattccacaacttaaaaccctgacccagacgctgagtgaaaaatcccgcgcatttgccaatatcgtcaaaatcggtcgtacccacttgcaggacgcgacgccgttaacgctggggcaggagatttccggctgggtagcgatgctggagcataatctcaaacatatcgaatacagcctgcctcacgtagcggaactggc

SEQ ID NO: 709 - DNA, 469 bp, Escherichia coli
cgagcgccattcggcaggcggcggatgaagtactggcaggacagcatgacgacgaattcccgctggctatctggcagaccggctccggcacgcaatgtaacatgaacatgaacgaagtgctggctaaccgggccagtgaattactcggtggcgtgcgcgggatggaacgtaaagttcaccctaacgacgacgtgaacaaaagccaaagttccaacgatgtctttccgacggcgatgcacgttgcggcactactggcgctgcgcaagcaactcattccacaacttaaaaccctgacccagacgctgagtgaaaaatcccgcgcatttgctgatatcgtcaaaatcggtcgtacccacttgcaggacgccacgccgttaacgctggggcaggagatttccggctgggtagcgatgctggagcataatctcaaacatatcgaatacagcctgcctcacgtagcggaactggc

SEQ ID NO: 710 - DNA, 469 bp, Escherichia coli
cgagcgccattcggcaggcggcggatgaagtactggcaggacagcatgacgacgaattcccgctggctatctggcagaccggctccggcacgcaaagtaacatgaacatgaacgaagtgctggctaaccgggccagtgaattactcggcggcgtgcgcgggatggaacgtaaagttcaccctaacgacgacgtgaacaaaagccaaagttccaacgatgtctttccgacggcgatgcacgttgcggcgctgctggcgctgcgcaagcaactcattccgcagcttaaaaccctgacacagacgctgagtgagaaatcccgtgcatttgccgatatcgtcaaaattggtcgtactcacttgcaggatgccacgccgttaacactggggcaggagatttccggctgggtagcgatgctcgagcataatctcaaacatatcgaatacagcctgcctcacgtagcggaactggc

SEQ ID NO: 711 - DNA, 469 bp, Escherichia coli
cgagcgccattcggcaggcggcggatgaagtactggcaggacagcatgacgacgaattcccgctggctatctggcagaccggctccggcacgcaaagtaacatgaacatgaacgaagtgctggctaaccgggccagtgaattactcggcggcgtgcgcgggatggaacgtaaagttcaccctaacgacgacgtgaacaaaagccaaagttccaacgatgtctttccgacggcgatgcacgttgctgcgctgctggcgctgcgcaagcaactcattccgcagcttaaaaccctgacacagacgctgagtgaaaaatcgcgtgcatttgccgatatcgtcaaaatcggtcgaacccacttgcaggacgccacgccgctaacactagggcaggagatttccggctgggtagcgatgctcgagcataatctcaaacatatcgaatacagcctgcctcacgtagcggaactggc

SEQ ID NO: 712 - DNA, 469 bp, Escherichia coli
cgagcgccattcggcaggcggcggatgaagtactggcaggacagcatgacgacgaattcccgctggctatctggcagaccggctccggcacgcaaagtaacatgaacatgaacgaagtgctggctaaccgggccagtgaattactcggtggcgtgcgcgggatggaacgtaaagttcaccctaacgacgacgtgaacaaaagccaaagttccaacgatgtctttccgacggcgatgcacgttgcggcactactggcgctgcgtaagcaactcattccacaacttaaaaccctgacccagacgctgagtgaaaaatcccgcgtatttgctgatatcgtcaaaatcggtcgtacccacttgcaggacgccacgccgttaacgctggggcaggagatttccggctgggtagcgatgctcgagcataatctgaaacatatcgaatacagcctgccgcatgtagcggaactggc

SEQ ID NO: 713 - DNA, 469 bp, Escherichia coli
cgagagccattcgccaggcggtggatgaagtgctggcagggcaacatgatgatgagttcccgctggcaatctggcaaacgggatccggtacgcaaagcaatatgaatatgaatgaagtactggctaatcgggccagcgaattgcttggcggtgtacgcggaatggaacgtaaagttcaccctaacgatgacgtgaacaaaagccaaagctccaatgatgtcttcccaactgctatgcacgtagcggcgttattggcactgcgtaagcaactcattcctcagctcaaaaacctcactcaaactctgaatgagaaatcgcgcgcatttgccgatatcgtcaaaattggtcgtacccacttgcaggacgccacaccgctgaccctgggacaggagatttctggttgggtagcgatgctggagcataatctcaaacatattgaatacagcctgcctcacgtagcggaactggc

SEQ ID NO: 714 - DNA, 469 bp, Escherichia coli
cgagcgccattcgtcaggcggcggatgaagtactggcaggacagcatgacgatgaattcccgctggcaatctggcagaccggctccggcacgcaaagtaatatgaacatgaacgaagtgctggctaatcgggccagtgaattacttggcggtgtgcgcgggatggaacgtaaagttcaccctaacgatgacgtgaacaaaagccaaagttccaatgatgtctttccgacggcgatgcacgttgcggcgctactggcgctgcgcaagcaactcattccgcagcttaaaaccctgacacagacgctgaatgagaaatcgcgcgcatttgccgatatcgtcaaaattggtcgtacccacttgcaggatgccacgccgctaacactggggcaggagatttccggctgggtagcgatgctcgagcataatctcaaacatatcgaatacagcctgccgcatgtagcggaactggc

SEQ ID NO: 715 - DNA, 469 bp, Escherichia coli
cgatcgccattcggcaggcggcggatgaagtactggcaggacagcatgacgacgaattcccgctggctatctggcagaccggctccggcacgcaaagtaacatgaacatgaacgaagtgctggctaaccgggccagtgaattactcggcggcgtgcgcgggatggaacgtaaagttcaccctaacgacgacgtgaacaaaagccaaagttccaacgatgtctttccgacggcgatgcacgttgcggcgctgctggcgctgcgcaagcaactcattccgcagcttaaaaccctgacacagacactgagtgaaaaatcgcgtgcatttgccgatatcgtcaaaatcggtcgaacccacttgcaggacgccacgccgctaacactagggcaggagatttccggctgggtagcgatgctcgagcataatctcaaacatatcgaatacagcctgcctcacgtagcggaactggc

SEQ ID NO: 716 - DNA, 469 bp, Escherichia coli
cgagcgccattcggcaggcggcggatgaagtactggcaggacagcatgacgacgaattcccgctggctatctggcagaccggttccggcacgcaaagtaacatgaacatgaacgaagtgctggctaaccgggccagtgaattactcggcggcgtgcgcgggatggaacgtaaagttcaccctaacgacgacgtgaacaaaagccaaagttccaacgatgtctttccgacggcgatgcacgttgcggcgctgctggcgctgcgcaagcaactcattccgcagcttaaaaccctgacacagacactgagtgaaaaatcgcgtgcatttgccgatatcgtcaaaatcggtcgaacccacttgcaggacgccacgccgctaacactagggcaggagatttccggctgggtagcgatgctcgagcataatctcaaacatatcgaatacagcctgcctcacgtagcggaactggc

SEQ ID NO: 717 - DNA, 469 bp, Escherichia coli
cgagcgccattcggcaggcggcggatgaagtactggcaggacagcatgacgacgaattcccgctggctatctggcagaccggttctggcacacaaagtaacatgaacatgaacgaagtgctggccaatcgggcgagtgaactgctcggcggcgtgcgcgggatggaacgtaaagttcaccctaacgatgacgtgaacaaaagccaaagttccaacgatgtctttccgacggcgatgcacgttgcggcgctgctggcgctgcgcaagcaactcattccgcagcttaaaaccctgacacagacgctgagtgaaaaatcacgtgcatttgccgatatcgtaaaaatcggtcgaacccacttgcaggacgccacgccgctaacactggggcaggagatttccggctgggtagcgatgctcgagcataatctcaaacatatcgaatacagcctgcctcacgtagcggaactggc

SEQ ID NO: 718 - DNA, 469 bp, Escherichia coli
cgagcgccattcgtcaggcggcggatgaagtactggcaggacagcatgacgacgaattcccgctggctatctggcagaccggctccggcacgcaaagtaacatgaacatgaacgaagtgctggctaaccgggccagtgaattactcggcggtgtgcgcgggatggaacgtaaagttcaccctaacgacgacgtgaacaaaagccaaagttccaacgatgtctttccgacggcgatgcacgttgcggcgctgctggcgctgcgcaagcaactcattccgcagcttaaaaccctgacacagacgctgagtgaaaaatcgcgtgcatttgccgatatcgtaaaaatcggtcgaacccacttgcaggacgccacgccgctaacactggggcaggagatttccggctgggtagcgatgctcgagcataatctcaaacatatcgaatacagcctgcctcacgtagcggaactggc

SEQ ID NO: 719 - DNA, 469 bp, Escherichia coli
cgagcgccattcggcaggcggcggatgaagtactagcaggacagcatgacgacgaattcccgctggctatctggcagaccggctccggcacgcaaagtaacatgaacatgaacgaagtgctggctaaccgggccagtgaattactcggcggcgtgcgcgggatggaacgtaaagttcaccctaacgacgacgtgaacaaaagccaaagttccaacgatgtctttccgacggcgatgcacgttgcggcgctgctggcgctgcgcaagcaactcattccgcagcttaaaaccctgacacagacactgagtgaaaaatcgcgtgcatttgccgatatcgtcaaaattggtcgaacccacttgcaggacgccacgccgctaacactggggcaggagatttccggctgggtagcgatgctcgagcataatctcaaacatatcgaatacagcctgcctcacgtagcggaactggc

SEQ ID NO: 720 - DNA, 469 bp, Escherichia coli
cgagcgccattcggcaggcggcggatgaagtactggcaggacagcatgacgacgaattcccgctggctatctggcagaccggctccggcacgcaaagtaacatgaacatgaacgaagtgctggctaaccgggccagtgaattactcggcggcgtgcgcgggatggaacgtaaagttcaccctaacgacgacgtgaacaaaagccaaagttccaacgatgtctttccgacggcgatgcacgttgcggcgctgctggcgctgcgcaagcaactcattccgcagcttaaaaccctgacacagacactgagtgaaaaatcgcgtgcatttgccgatatcgtcaaaatcggccgaacccacttgcaggacgccacgccgctaacactagggcaggagatttccggctgggtagcgatgctcgagcataatctcaaacatatcgaatacagcctgcctcacgtagcggaactggc

SEQ ID NO: 721 - DNA, 469 bp, Escherichia coli
cgagcgccattcggcaggcggcggatgaagtactggcaggacatcatgacgacgaattcccgctggctatctggcagaccggctccggcacgcaaagtaacatgaacatgaacgaagtgctggctaaccgggccagtgaattactcggcggcgtgcgcgggatggaacgtaaagttcaccctaacgacgacgtgaacaaaagccaaagttccaacgatgtctttccgacggcgatgcacgttgcggcgctgctggcgctgcgcaagcaactcattcctcagcttaaaaccctgacacagacactgaatgagaaatcccgtgcatttgccgatatcgtcaaaattggtcgtactcacttgcaggatgccacgccgttaacactggggcaggagatttccggctgggtagcgatgatcgagcataatctcaaacatatcgaatacagcctgcctcacgtagcggaactggc

SEQ ID NO: 722 - DNA, 469 bp, Escherichia coli
cgagcgccattcggcaggcggcggatgaagtgctggcaggacagcatgacgacgaattcccgctggctatctggcagaccggctccggcacgcaaagtaacatgaacatgaacgaagtgctggctaaccgggccagtgaattactcggcggcgtgcgcgggatggaacgtaaagttcaccctaacgacgacgtgaacaaaagccaaagttccaacgatgtctttccgacggcgatgcacgttgcggcgctgctggtgctgcgcaagcaactcattccacaacttaaaaccctgacccagacgctgagtgaaaaatcccgcgcatttgctgatatcgtcaaaatcggtcgtacccacttgcaggacgccacgccgttaacgctggggcaggagatttccggctgggtagcgatgctggagcataatctcaaacatatcgaatacagcctgcctcacgtagcggaactggc

SEQ ID NO: 723 - DNA, 469 bp, Escherichia coli
cgagcgccattcgtcaggcggcggatgaagtactggcaggacagcatgacgacgaattcccgctggctatctggcagaccggctccggcacgcaaagtaacatgaacatgaacgaagtgctggctaaccgggccagtgaattactcggcggtgtgcgcgggatggaacgtaaagttcaccctaacgacgacgtgaacaaaagccaaagttccaacgatgtctttccgacggcgatgcacgttgcggcgctgctggcgctgcgcaagcaactcattcctcagcttaaaaccctgacacagacactgaatgagaaatcccgtgcttttgccgatatcgtcaaaattggtcgtactcacttgcaggatgccacgccgttaacgctggggcaggagatttccggctgggtagcgatgctcgagcataatctcaaacatatcgaatgcagcctgcctcacgtagcggaactggc

SEQ ID NO: 724 - DNA, 469 bp, Escherichia coli
cgagcgccattcggcaggcggcggatgaagtactggcaggacagcatgacgacgaattcccgctggctatctggcagaccggctccggcacgctaagtaacatgaatatgaacgaagtgctggctaaccgggccagtgaattactcggtggcgtgcgcgggatggaacgtaaagttcaccctaacgacgacgtgaacaaaagccaaagttccaacgatgtctttccgacggcgatgcacgttgcggcactactggcgctgcgcaagcaactcattccacaacttaaaaccctgacccagacgctgagtgaaaaatcccgcgcatttgctgatatcgtcaaaatcggtcgtacccacttgcaggacgccacgccgttaacgctggggcaggagatttccggctgggtagcgatgctggagcataatctcaaacatatcgaatacagcctgcctcacgtagcggaactggc

SEQ ID NO: 725 - DNA, 469 bp, Escherichia coli
cgagcgccattcgtcaggcggcggatgaagtactggcaggacagcatgacgacgaattcccgctggctatctggcagaccggctccggcacgcaaagtaatatgaacatgaacgaagtgctggctaaccgggccagtgaattactcggcggcgtgcgtgggatggagcgtaaagttcaccctaacgacgacgtgaacaaaagccaaagttctaacgatgtctttccaacggcgatgcacgttgcggcgctgctggcgctgcgcaagcaactcattcagcagcttaaaaccctgacacagacactgaatgagaaatcgcgcgcatttgccgatatcgtcaaaatcggtcgaacccacttgcaggatgccacgccgctaacactggggcaggagatttccggctgggtagcgatgctcgagcataatctcaaacatatcgaatacagcctgccgcatgtagcggaactggc

SEQ ID NO: 726 - DNA, 469 bp, Escherichia coli
cgagtgctatccgtcaggcagcggatgaagtgctggcgggacagcatgacgatgaatttccgctggctatctggcagacgggttccggcacgcaaagcaacatgaatatgaacgaagtgctggccaatcgggcgagcgaactgctcggtggcgtgcgcggaatggaacgtaaaattcaccctaacgacgacgtgaacaaaagccaaagttcaaatgatgtctttccgacagcaatgcacgttgcggcgctgctggcgctacgcaagcaactcatcccgcagcttaaaacactgacacaaacgctgaatgagaaatcgcgcgcatttgccgatatcgtcaaaattggtcgtacccacttgcaggacgccacgccgctgacactgggacaggagatttccggctgggtagcgatgctggagcataatctcaaacatattgaatacagcctgccgcatgtggcggaactggc

SEQ ID NO: 727 - DNA, 469 bp, Escherichia coli
cgagcgccattcggcaggcggcggatgaagtactggcaggacagcatgacgacgaattcccgctggctatctggcagaccggctccggcacgcaaagtaacatgaacatgaacgaagtgttggctaaccgggccagtgaattactcggcggcgtgcgcgggatggaacgtaaagttcaccctaacgacgacgtgaacaaaagccaaagttccaacgatgtctttccgacggcgatgcacgttgcggcactactggcgctgcgcaagcaactcattccacaacttaaaaccctgacccagacgctgagtgaaaaatcccgcgcatttgctgatatcgtcaaaatcggtcgtacccacttgcaggacgccacgccgttaacgctggggcaggagatttccggctgggtagcgatgctggagcataatctcaaacatatcgaatacagcctgcctcacgtagcggaactggc

SEQ ID NO: 728 - DNA, 469 bp, Escherichia coli
cgagcgccattcggcaggcggcggatgaagtactggcaggacagcatgacgacgaattcccgctggctatctggcagaccggctccggcacgcaaagtaacatgaatatgaacgaagtgctggctaaccgggccagtgaattactcggtggcgtgcgcgggatggaacgtaaagttcaccctaacgacgacgtgaacaaaagccaaagttccaacgatgtctttccgacggcgatgcacgttgcggcactactggcgctgcgcaagcaactcattccacaacttaaaaccctgactcagacgctgagtgaaaaatcccgcgcatttgctgatatcgtcaaaatcggtcgtacccacttgcaggacgccacgccgttaacgctggggcaggagatttccggctgggtagcgatgctggagcataatctcaaacatatcgaatacagcctgcctcacgtagcggaactggc

SEQ ID NO: 729 - DNA, 469 bp, Escherichia coli
cgagcgccattcggcaggcggcggatgaagtactggcaggacagcatgacgacgaattcccgctggctatctggcagaccggctccggcacgcaaagtaacatgaacatgaacgaagtgctggctaaccgggccagtgaattactcggcggcgtgcgcgggatggaacgtaaagttcaccctaacgacgacgtgaacaaaagccaaagttccaacgatgtctttccgacggcgatgcacgttgcggcgctgctggcgctgcgcaagcaactcattccgcagcttaaaaccctgacacagacactgagtgaaaaatcgcgtgcatttgccgatatcgttaaaatcggtcgaacccacttgcaggacgccacgccgctaacactagggcaggagatttccggctgggtagcgatgctcgagcataatctcaaacatatcgaatacagcctgcctcacgtagcggaactggc

SEQ ID NO: 730 - DNA, 469 bp, Escherichia coli
cgagcgccattcggcaggcggcggatgaagtactggcaggacagcatgacgacgaattcccgctggctatctggcagaccggctccggcacgcaaagtaacatgaatatgaacgaagtgctggctaaccgggccagtgaattactcggtggcgtgtgcgggatggaacgtaaagttcaccctaacgacgacgtgaacaaaagccaaagttccaacgatgtctttccgacggcgatgcacgttgcggcactactggcgctgcgcaagcaactcattccacaacttaaaaccctgacccagacgctgagtgaaaaatcccgcgcatttgctgatatcgtcaaaatcggtcgtacccacttgcaggacgccacgccgttaacgctggggcaggagatttccggctgggtagcgatgctggagcataatctcaaacatatcgaatacagcctgcctcacgtagcggaactggc

SEQ ID NO: 731 - DNA, 469 bp, Escherichia coli
cgagcgccattcggcaggcggcggatgaagtactggcaggacagcatgacgacgaattcccgctggctatctggcagaccggctccggcacgcaaagtaacatgaacatgaatgaagtgctggctaaccgggccagtgaattactcggcggcgtgcgcgggatggaacgtaaagttcaccctaacgacgacgtgaacaaaagccaaagttccaacgatgtctttccgacggcgatgcacgttgcggcactactggagctgcgcaagcaactcattccacaacttaaaaccctgacccagacgctgagtgaaaaatcccgcgcatttgccgatatcgtcaaaatcggtcgtacccacttgcaggacgcgacgccgttaacgctggggcaggagatttccggctgggtagcgatgctggagcataatctcaaacatatcgaatacagcctgcctcacgtagcggaactggc

SEQ ID NO: 732 - DNA, 469 bp, Escherichia coli
cgagcgccattcggcaggcggcggatgaagtactggcaggacagcatgacgacgaattcccgttggctatctggcagaccggctccggcacgcaaagtaacatgaacatgaacgaagcgctggctaaccgggccagtgaattactcggcggcgtgcgcgggatggaacgtaaagttcaccctaacgacgacgtgaacaaaagccaaagttccaacgatgtctttccgacggcgatgcacgttgcggcgctgctggcgctgcgcaagcaactcattccacaacttaaaaccctgacccagacgctgagtgaaaaatcccgcgcatttgccgatatcgtcaaaatcggtcgtacccacttgcaggacgccacgccgttaacgctggggcaggagatttccggctgggtagcgatgctggagcataatctcaaacatatcgaatacagcctgcctcacgtagcggaactggc

SEQ ID NO: 733 - DNA, 469 bp, Escherichia coli
cgagcgccattcgtcaggcggcggatgaagtactggcaggacagcatgacgacgaattcccgctggctatctggcagaccggctccggcacgcaaagtaacatgaacatgaacgaagtgctggctaaccgggccagtgaattactcggcggcgtgcgcgggatggaacgtaaagttcaccctaacgacgacgtgaacaaaagccaaagttccaacgatgtctttccgacggcgatgcacgttgcggcgctgctggcgctgcgcaagcaactcattccgcagcttaaaaccctgacacagacgctgagtgaaaaatcgcgtgcatttgccgatatcgtaaaaatcggtcgaacccacttgcaggacgccacgccgctaacactggggcaggagatatccggctgggtagcgatgctcgagcataatctcaaacatatcgaatacagcctgcctcacgtagcggaactggc

SEQ ID NO: 734 - DNA, 469 bp, Escherichia coli
cgagcgccattcggcaggcggcggatgaagtactggcaggacagcatgacgacgaattcccgctggctatctggcagaccggctccggcacgcaaagtaacatgaacatgaacgaagtgctggctaaccgggccagtgaattactcggcggtgtgcgcgggatggaacgtaaagttcaccctaacgacgacgtgaacaaaagccaaagctccaacgatgtctttccgacggcgatgcacgttgcggcgctgctggcgctgcgcaagcaactcattccacagcttaaaaccctgacacagacactgaatgagaaatcccgtgcatttgccgatatcgtcaaaattggtcgtactcacttgcaggatgccacgccgctaacactggggcaggagatttccggctgggtagcgatgctcgagcataatctcaaacatatcgaatacagcctgcctcacgtagcggaactggc

SEQ ID NO: 735 - DNA, 454 bp, Escherichia coli
cgagcgccattcggcaggcggcggatgaagtactggcaggacagcatgacgacgaattcccgttggctatctggcagaccggctccggcacgcaaagtaacatgaacatgaacgaagtgctggctaaccgggccagtgaattactcggcggcgtgcgcgggatggaacgtaaagttcaccctaacgacgacgtgaacaaaagccaaagttccaacgatgtctttccgacggcgatgctggcgctgcgcaagcaactcattccacaacttaaaaccctgacccagacgctgagtgaaaaatcccgcgcatttgccgatatcgtcaaaatcggtcgtacccacttgcaggacgccacgccgttaacgctggggcaggagatttccggctgggtagcgatgctggagcataatctcaaacatatcgaatacagcctgcctcacgtagcggaactggc

SEQ ID NO: 736 - DNA, 469 bp, Escherichia coli
cgagcgccattcgtcaggcggcggatgaagtactggcaggacagcatgacgacgaattcccgctggctatctgacagaccggctccggcacgcaaagtaacatgaacatgaacgaagtgctggctaaccgggccagtgaattactcggcggtgtgcgcgggatggaacgtaaagttcaccctaacgacgacgtgaacaaaagccaaagttccaacgatgtctttccgacggcgatgcacgttgcggcgctgctggcgctgcgcaagcaactcattcctcagcttaaaaccctgacacagacactgaatgagaaatcccgtgcttttgccgatatcgtcaaaattggtcgtactcacttgcaggatgccacgccgttaacgctggggcaggagatttccggctggatagcgatgctcgagcataatctcaaacatatcgaatacagcctgcctcacgtagcggaactggc

SEQ ID NO: 737 - DNA, 469 bp, Escherichia coli
cgagcgccattcggcaggcggcggatgaagtactggcaggacagcatgacgacgaattcccgttggctatctggcagaccggctccggcacgcaaagtaacatgaacatgaacgaagtgctggctaaccgggccagtgaattactcggcggcgtgcgcgggatggaacgtaaagttcaccctaacgacgacgtgaacaaaagccaaagttccaacgatgtctttccgacggcgatgcacgttgcggcgctgctggcgctgcgcaagcaactcattccacaacttaaaaccctgacccagacgctgagtgaaaaatcccgcgcatttgctgatatcgtcaaaatcggtcgtacccacttgcaggacgccacgccgttaacgctggggcaggagatttccggctgggtagcgatgctcgagcataatctcaaacatatcgaatacagcctgcctcacgtagcggaactggc

SEQ ID NO: 738 - DNA, 469 bp, Escherichia coli
cgagcgccattcgtcaggcggcggatgaagtactggcaggacagcatgacgacgaattcccgctggctatctggcagaccggctccggcacgcaaagtaatatgaacatgaacgaagtgctggctaaccgggccagtgaattactcggcggtgtgcgcgggatggaacgtaaagttcaccctaacgacgacgtgaacaaaagccaaagttccaacgatgtctttccgacggcgatgcacgttgcggcgctgctggcgctgcgcaagcaactcattcctcagcttaaaaccctgacacagacactgaatgagaaatcccgtgcttttgccgatatcgtcaaaattggtcgtactcacttgcaggatgccacgccgttaacgctggggcaggagatttccggctgggtagcgatgctcgagcataatctcaaacatatcgaatacagcctgcctcacgtagcggaactggc

SEQ ID NO: 739 - DNA, 469 bp, Escherichia coli
cgagtgccattcgtcaggcggcagatgaagtgctggcgggacagcatgacgatgaatttccgctggctatctggcagaccggttccggtacgcaaagcaatatgaatatgaacgaagtgctggctaaccgggcgagcgaattgcttggcggcgtgcgtgggatggaacgtaaagttcaccctaatgacgacgtgaacaaaagccaaagttccaatgatgtctttccgacggcgatgcatgttgcggcgctgctggcgctgcgcaagcaactcattccgcagcttaaaacactgacacaaacgctgagtgaaaaatcgcgcgcatttgccgatatcgtcaaaattggtcgtacccacttgcaggacgccacgccgctgacgttggggcaggagatttctggctgggtagcgatgctggagcataatctcaaacatatcgagtacagtctgccgcacgtggcggaactggc

SEQ ID NO: 740 - DNA, 469 bp, Escherichia coli
cgagcgccattcggcaggcggcggatgaagtactggcaggacagcatgacgacgaattcccgctggctatctggcagaccggctccggcacgcaaagtaacatgaacatgaacgaagtgctggctaaccgggccagtgaattactcggcggcgtgcgcgggatggaacgtaaagttcaccctaacgacgacgtgaacaaaagccaaagttccaacgatgtctttccgacggcgatgcacgttgcggcgctgctggcgctgcgcaagcaactcattctgcagcttaaaaccctgacacagacgctgagtgaaaaatcgcgtgcatttgccgatatcgtcaaaatcggtcgaacccacttgcaggacgccacgccgctaacactggggcaggagatttccggctgggtagcgatgctcgagtataatctcaaacatatcgaatacagcctgcctcacgtagcggaactggc

SEQ ID NO: 741 - DNA, 469 bp, Escherichia coli
cgagcgccattcggcaggcggcggatgaagtactggcaggacagcatgacgacgaattcccgctggctatctggcagaccggctccggcacgcaaagtaacatgaacatgaatgaagtgctggctaaccgggccagtgaattactcggcggcgtgcgcgggatggaacgtaaagttcaccctaacgacgacgtgaacaaaagccaaagttccaacgatgtctttccgacggcgatgcacgttgcggcgctgctggcgctgcgcaagcaactcattccgcagcttaaaaccctgacacagacgctgagtgaaaaatcccgtgcatttgccgatatcgtcaaaatcggtcgaacccacttgcaggacgccacgccgctaacactagggcaggagatttccggctgggtagcgatgctcgagcataatctcaaacatatcgaatacagcctgcctcacgtagcggaactggc

SEQ ID NO: 742 - DNA, 469 bp, Escherichia coli
cgagcgccattcggcaggcggcggatgaagtactggcaggacagcatgacgacgaattcccgctggctatctggcagaccggctccggcacgcaaagtaacatgaacatgaacgaagtgctggctaaccgggccagtgaattactcggcggcgtgcgcgggatggaacgtaaagttcaccctaacgacgacgtcaacaaaagccaaagttccaacgatgtctttccgacggcgatgcacgttgcggcgctgctggcgctgcgcaagcaactcattccgcagcttaaaaccctgacacagacgctgagtgaaaaatcgcgtgcatttgtcgatatcgtcaaaatcggtcgaacccacttgcaggacgccacgccgctaacactagggcaggagatttccggctgggtagcgatgctcgagcataatctcaaacatatcgaatacagcctgcctcacgtagcggaactggc

SEQ ID NO: 743 - DNA, 469 bp, Escherichia coli
cgagcgccattcggcaggcggcggatgaagtactggcaggacagcatgacgacgaattcccgctggctatctggcagaccggctccggcacgcaaagtaacatgaacatgaacgaagtgctggctaaccgggccagtgaattactcggcggcgcgcgcgggatggaacgtaaagttcaccctaacgacgacgtgaacaaaagccaaagttccaacgatgtctttccgacggcgatgcacgttgcggcgctgctggcgctgcgcaagcaactcattccgcagcttaaaaccctgacacagacactgagtgaaaaatcgcgtgcatttgccgatatcgtcaaaatcggtcgaacccacttgcaggacgccacgccgctaacactagggcaggagatttccggctgggtagcgatgctcgagcataatctcaaacatatcgaatacagcctgcctcacgtagcggaactggc

SEQ ID NO: 744 - DNA, 469 bp, Escherichia coli
cgagcgccattcggcaggcggcggatgaagtactggcaggacagcatgacgacgaattcccgctggctatctggcagaccggctccggcacgcaaagtaacatgaacatgaacgaagtgttggctaaccgggccagtgaattactcggcggcgtgcgcgggatggaacgtaaagttcaccctaacgacgacgtgaacaaaagccaaagttccaacgatgtctttccgactgcgatgcacgttgcggcactactggcgctgcgcaagcaactcattccacaacttaaaaccctgacccagacgctgagtgaaaaatcccgcgcatttgccgatatcgtcaaaatcggtcgtacccacttgcaggacgcgacgccgttaacactggggcaggagatttccggctgggtagcgatgctggagcataatctcaaacatatcgaatacagcctgcctcacgtaacggaactggc

SEQ ID NO: 745 - DNA, 469 bp, Escherichia coli
cgagcgccattcggcaggcggcggatgaagtactggcaggacagcatgacgacgaattcccgctggctatctggcagaccggctccggcacgcaaagtaacatgagcatgaatgaagtgctggctaaccgggccagtgaattactcggcggcgtgcgcgggatggaacgtaaagttcaccctaacgacgacgtgaacaaaagccaaagttccaacgatgtctttccgacggcgatgcacgttgcggcactactggcgctgcgcaagcaactcattccacaacttaaaaccctgacccagacgctgagtgaaaaatcccgcgcatttgccgatatcgtcaaaatcggtcgtacccacttgcaggacgcgacgccgttaacgctggggcaggagatttccggctgggtagcgatgctggagcataatctcaaacatatcgaatacagcctgcctcacgtagcggaactggc

SEQ ID NO: 746 - DNA, 469 bp, Escherichia coli
cgagcgccattcggcaggcggcggatgaagtactggcaggacagcatgacgacgaattcccgctggctatctggcagaccggctccggcacgcaaagtaacatgaacatgaacgaagtgctggctaaccgggccagtgaattactcggcggcgtgcgtgggatggagcgtaaagttcaccctaacgacgacgtgaacaaaagccaaagttctaacgatgtctttccaacggcgatgcacgttgcggcgctgctggcgctgcgcaagcaactcattccgcagcttaaaaccctgacacagacactgaatgagaaatcccgtgcatttgccgatatcgtcaaaattggtcgtactcacttgcaggatgccacgccgttaacgctggggcaggagatttccggctgggtagcgatgctggagcataatctcaaacatattgaatacagcctgcctcacgtagcggaactggc

SEQ ID NO: 747 - DNA, 469 bp, Escherichia coli
cgagcgccattcggcaggcggcggatgaagtactggcaggacagcatgacgacgaattcccgctggctatctggcagaccggctccggcacgcaaagtaacatgaacatgaacgaagtgctggctaaccgggccagtgaattactcggcggcgtgcgcgggatggaacgtaaagttcaccctaacgacgacgtgaacaaaagccaaagttccaacgatgtctttccgacggcgatgcacgttgcggcgctgctggcgctgcgcaagcaactcattccgcagcttaaaaccctgacacagacactgaatgagaaatcccgtgcatttgccgatatcgtcaaaattggtcgtactcacttgcaggatgccacgccgttaacgctggggcaggagatttccggctgggtagcgatgctcgagcataatctcaaacatatcgaatacagcctgcctcacgtagcggaactggc

SEQ ID NO: 748 - DNA, 469 bp, Escherichia coli
cgagcgccattcggcaggcggcggatgaagtactggcaggacagcatgacgacgaattcccgttggctatctggcagaccggctccggcacgcaaagtaacatgaacatgaacgaagtgctggctaaccgggccagtgaattactcggcggcgtgcgcgggatggaacgtaaagttcaccctaacgacgacgtgaacaaaagccaaagttccaacgatgtctttccgacggcgatgcacgttgcggcgctgctggcgctgcgcaagcaactcattccgcagcttaaaaccctgacacagacactgaatgagaaatcccgtgcatttgccgatatcgtcaaaattggtcgtactcacttgcaggatgccacgccgttaacgctggggcaggagatttccggctgggtagcgatgctggagcataatctcaaacatattgaatacagcctgcctcacgtagcggaactggc

SEQ ID NO: 749 - DNA, 469 bp, Escherichia coli
cgagcgccattcggcaggcggcggatgaagtactggcaggacagcatgacgacgaattcccgctggctatctggcagaccggctccggcacgcaaagtaacatgaacatgaacgaagtgctggctaaccgggccagtgaattactcggcggcgtgcgcgggatggaacgtaaagttcaccctaacgacgacgtgaacaaaagccaaagttccaacgatgtctttccgacggcgatgcacgttgcggcgctgctggcgctgcgcaagcaactcattccgcagcttaaaaccctgacaaagacgctgagtgaaaaatcccgtgcatttgccgatatcgtcaaaatcggtcgaacccacttgcaggacgccacgccgctaacactagggcaggagatttccggctgggtagcgatgctcgagcataatctcaaacatatcgaatacagcctgcctcacgtagcggaactggc

SEQ ID NO: 750 - DNA, 469 bp, Escherichia coli
cgagcgccattcgtcaggcggcggatgaagtactggcaggacagcatgacgacgaattcccgctggctatctggcagaccggctccggcacgcaaagtaacatgaacatgaacgaagtgttggctaaccgggccagtgaattactcggcggtgtgcgcgggatggaacgtaaagttcaccctaacgacgacgtgaacaaaagccaaagttccaacgatgtctttccgacggcgatgcacgttgcggcgctgctggcgctgcgcaagcaactcattcctcagcttaaaaccctgacacagacactgaatgagaaatcccgtgcttttgccgatatcgtcaaaattggtcgtactcacttgcaggatgccacgccgttaacgctggggcaggagatttccggctgggtagcgatgctcgagcataatctcaaacatatcgaatacagcctgcctcacgtagcggaactggc

SEQ ID NO: 751 - DNA, 469 bp, Escherichia coli
cgagcgccattcggcaggcggcggatgaagtactggcaggacagcatgacgacgaattcccgctggctatctggcagaccggctccggcacgcaaagtaacatgaacatgaacgaagtgctggctaaccgggccagtgaattactcggcggcgtgcgcgggatggaacgtaaagttcaccctaacgacgacgtgaacaaaagccaaagttccaacgatgtctttccgacggcgatgcacgttgcggcgctgctggcgctgcgcaagcaactcattccgcagcttaaaaccctgacacagacactgagtgaaaaatcgcgtgcatttgccgatatcgtcaaaatcggtcgaacccacttgcaggacgccacgccgctaacactagggcaggagatttccggctgggtagcgatgctcgagcataatctcgaacatatcgaatacagcctgcctcacgtagcggaactggc

SEQ ID NO: 752 - DNA, 469 bp, Escherichia coli
cgagcgccattcgtcaggcggcggatgaagtactggcaggacagcatgacgacgaattcccgctggctatctggcagaccggctccggcacgcaaagtaacatgaacatgaacgaagtgctggctaaccgggccagtgaattactcggcggtgtgcgcgggatggaacgtaaagttcaccctaacgacgacgtgaacaaaagccaaagttccaacgatgtctttccgacggcgatgcacgttgcggcgctgctggcgctgcgtaagcaactcattcctcagcttaaaaccctgacacagacactgaatgagaaatcccgtgcttttgccgatatcgtcaaaattggtcgtactcacttgcaggatgccacgccgttaacgctggggcaggagatttccggctgggtagcgatgctcgagcataatctcaaacatatcgaatacagcctgcctcacgtagcggaactggc

SEQ ID NO: 753 - DNA, 469 bp, Escherichia coli
cgagcgccattcgtcaggcggcggatgaagtactggcagaacagcatgacgacgaattcccgctggctatctggcagaccggctccggcacgcaaagtaacatgaacatgaacgaagtgctggctaaccgggccagtgaattactcggcggtgtgcgcgggatggaacgtaaagttcaccctaacgacgacgtgaacaaaagccaaagttccaacgatgtctttccgacggcgatgcacgttgcggcgctgctggcgctgcgcaagcaactcattcctcagcttaaaaccctgacacagacactgaatgagaaatcccgtgcttttgccgatatcgtcaaaattggtcgtactcacttgcaggatgccacgccgttaacgctggggcaggagatttccggctgggtagcgatgctcgagcataatctcaaacatatcgaatacagcctgcctcacgtagcggaactggc

SEQ ID NO: 754 - DNA, 469 bp, Escherichia coli
cgagcgccattcggcaggcggcggatgaagtactggcaggacagcatgacgacgaattcccgctggctatctggcagaccggctccggcacgcaaagtaacatgaacatgaacgaagtgctggctaaccgggccagtgaattactcggcggtgtgcgcgggatggaacgtaaagttcatcctaacgatgacgtgaacaaaagccaaagttccaacgatgtctttccgacggcgatgcacgttgcggcgctgctggcgctgcgcaagcaactcattccgcagcttaaaaccctgacacagacactgaatgagaaatcccgtgcatttgccgatatcgtcaaaattggtcgtactcacttgcaggatgccacgccgttaacactggggcaggagatttccggctgggtagcgatgctcgagcataatctcaaacatatcgaatacagcctgcctcacgtagcggaactggc

SEQ ID NO: 755 - DNA, 469 bp, Escherichia coli
cgagcgccattcgtcaggcggcggatgaagtactggcaggacagcatgacgacgaattcccattggctatctggcagaccggctccggcacgcaaagtaacatgaacatgaacgaagtgctggctaaccgtgccagtgaattactcggcggcgtgcgtgggatggagcgtaaagttcaccctaacgacgacgtgaacaaaagccaaagttctaacgatgtctttccaacggcgatgcacgttgcggcgctgctggcgctgcgcaagcaactcattccgcagcttaaaaccctgacacagacgctgagtgaaaaatcgcgtgcatttgccgatatcgtaaaaatcggtcgaacccacttgcaggacgccacgccgctaacactggggcaggagatttccggctgggtagcgatgctcgagcataatctcaaacatattgaatacagcctgcctcacgtagcggaactggc

SEQ ID NO: 756 - DNA, 469 bp, Escherichia coli
cgagcgccattcgtcaggcggcggatgaagtactggcaggacagcatgacgacgaattcccgctggctatctggcagaccggctccggcacgcaaagtaacatgaacatgaacgaagtgctggctacccgggccagtgaattactcggcggtgtgcgcgggatggaacgtaaagttcaccctaacgacgacgtgaacaaaagccaaagttccaacgatgtctttccgacggcgatgcacgttgcggcgctgctggcgctgcgcaagcaactcattcctcagcttaaaaccctgacacagacactgaatgagaaatcccgtgcttttgccgatatcgtcaaaattggtcgtactcacttgcaggatgccacgccgttaacgctggggcaggagatttccggctggatagcgatgctcgagcataatctcaaacatatcgaatacagcctgcctcacgtagcggaactggc

SEQ ID NO: 757 - DNA, 469 bp, Escherichia coli
cgagcgccattcgtcaggcggcggatgaagtactggcaggacagcatgacgacgaattcccgctggctatctggcagaccggctccggcacgcaaagtaacatgaacatgaacgaagtgctggctaaccgggccagtgaattactcggcggtgtgcgcgggatggaacgtaaagttcaccctaacgacgacgtgaacaaaagccaaagttccaacgatgtctttccgacggcgatgcacgttgcggcgctgctggcgctgcgcaagcaactcattcctcagcttaaaaccctgacacagacactgaatgagaaatcccgtgcttttgccgatatcgtcaaaattggtcgtactcacttgcaggatgccacgccgttaacgctggggcaggagatttccggctggatagcgatgctcgagcataatctcaaacatatcgaatacagccagcctcacgtagcggaactggc

SEQ ID NO: 758 - DNA, 469 bp, Escherichia coli
cgagcgccattcggcaggcggcggatgaagtactggcaggacagcatgacgacgaattcccattggctatctggcagaccggctccggcacgcaaagtaacatgaacatgaacgaagtgctggctaaccgggccagtgaattactcggcggcgtgcgtgggatggagcgtaaagttcaccctaacgacgacgtgaacaaaagccaaagttctaacgatgtctttccaacggcgatgcacgttgcggcgctgctggcgctgcgcaaacaactcattccgcagcttaaaaccctgacacagacgctgagtgaaaaatcccgtgcatttgccgatatcgtaaaaatcggtcgaacccacttgcaggacgccacgccgctaacactggggcaggagatttccggctgggtagcgatgctcgagcataatctcaaacatattgaatacagcctgcctcacgtagcggaactggc

SEQ ID NO: 759 - DNA, 469 bp, Escherichia coli
cgagcgccattcgtcaggcggcggatgaagtattggcaggacagcatgacgatgaattcccgctggcaatctggcagaccggctccggcacgcaaagtaatatgaacatgaatgaagtgctggctaatcgggccagtgaattacttggcggcgtgcgcgggatggagcgtaaagttcaccctaacgacgacgtgaacaaaagccaaagttccaatgatgtctttccgacggcgatgcacgttgcggcgctgctggcgctgcgcaagcaacttattccgcagcttaaaaccctgacacagacgctgaatgagaaatcgcgcgcatttgccgatatcgtcaaaattggtcgtacccacttgcaggatgccacgccgctaacactggggcaggagatttccggctgggtagcgatgctggagcataatctcaaacatatcgaatacagcctgccgcatgtagcggaactggc

SEQ ID NO: 760 - DNA, 469 bp, Escherichia coli
cgagcgccattcggcaggcggcggatgaagtactggcaggacagcatgacgacgaattcccgctggctatctggcaggccggctccggcacgcaaagtaacatgaacatgaacgaagtgctggctaaccgggccagtgaattactcggcggcgtgcgcgggatggaacgtaaagttcaccctaacgacgacgtgaacaaaagccaaagttccaacgatgtctttccgacggcgatgcacgttgcggcgctgctggcgctgcgcaagcaactcattccgcagcttaaaaccctgacacagacactgagtgaaaaatcgcgtgcatttgccgatatcgtcaaaatcggtcgaacccacttgcaggacgccacgccgctaacactagggcaggagatttccggctgggtagcgatgctcgagcataatctcaaacatatcgaatacagcctgcctcacgtagcggaactggc

SEQ ID NO: 761 - DNA, 469 bp, Escherichia coli
cgagcgccattcgtcaggcggcggatgaagtactggcaggacagcatgacgacgaattcccgctggctatctggcagaccggctccggcacgcaaagtaacatgaacatgaacgaagtgctggctaaccgggccagtgaattactcggcggtgtgcgcgggatggaacgtaaagttcaccctaacgacgacgtgaacaaaagccaaagttccaatgatgtctttccgacggcgatgcacgttgcggcgctgctggcgctgcgcaagcaactcattcctcagcttaaaaccctgacacagacactgaatgagaaatcccgtgcttttgccgatatcgtcaaaattggtcgtactcacttgcaggatgccacgccgttaacgctggggcaggagatttccggctgggtagcgatgctcgagcataatctcaaacatatcgaatacagcctgcctcacgtagcggaactggc

SEQ ID NO: 762 - DNA, 469 bp, Escherichia coli
cgagcgccattcggcaggcggcggatgaagtactggcaggacagcatgacgacgaattcccgctggctatctggcagaccggctccggcacgcaaagtaacatgaacatgaacgaagtgctggctaaccgggccagtgaattactcggcggcgtgcgcgggatggaacgtaaagttcaccctaacgacgacgtgaacaaaagccaaagttccaacgatgtctttccgacggctatgcacgttgcggcgctgctggcgctgcgcaagcaactcattccgcagcttaaaaccctgacacagacactgagtgaaaaatcgcgtgcatttgccgatatcgtcaaaatcggtcgaacccacttgcaggacgccacgccgctaacactagggcaggagatttccggctgggtagcgatgctcgagcataatctcaaacatatcgaatacagcctgcctcacgtagcggaactggc

SEQ ID NO: 763 - DNA, 469 bp, Escherichia coli
cgagcgccattcggcaggcggcggatgaagtactggcaggacagcatgacgacgaatttccgctggctatctggcagaccggctccggcacgcaaagtaacatgaatatgaacgaagtgctggctaaccgggccagtgaattactcggtggcgtgcgcgggatggaacgtaaagttcaccctaacgacgacgtgaacaaaagccaaagttccaacgatgtctttccgacggcgatgcacgttgcggcactactggcgctgcgcaagcaactcattccacaacttaaaaccctgacccagacgctgagtgaaaaatcccgcgcatttgctgatatcgtcaaaatcggtcgtacccacttgcaggacgccacgccgttaacgctggggcaggagatttccggctgggtagcgatgctggagcataatctcaaacatatcgaatacagcctgcctcacgtagcggaactggc

SEQ ID NO: 764 - DNA, 469 bp, Escherichia coli
cgagcgccattcgtcaggcggcggatgaagtactggcaggacagcatgacgacgaattcccgctggctatctggcagaccggctccggcacgcaaagtaacatgaacatgaacgaagcgctggctaaccgggccagtgaattactcggcggtgtgcgcgggatggaacgtaaagttcaccctaacgacgacgtgaacaaaagccaaagttccaacgatgtctttccgacggcgatgcacgttgcggcgctgctggcgctgcgcaagcaactcattcctcagcttaaaaccctgacacagacactgaatgagaaatcccgtgcttttgccgatatcgtcaaaattggtcgtactcacttgcaggatgccacgccgttaacgctggggcaggagatttccggctgggtagcgatgctcgagcataatctcaaacatatcgaatacagcctgcctcacgtagcggaactggc

SEQ ID NO: 765 - DNA, 469 bp, Escherichia coli
cgagcgccattcggcaggcggcggatgaagtactggcaggacagcatgacgacgaattcccgctggctatctggcagaccggctccggcacgcaaagtaacatgaacatgaatgaagtgctggctaaccgggccagtgaattactcggcggcgtgcgcgggatggaacgtaaagttcaccctaacgacgacgtgaacaaaagccaaagttccaacgatgtctttccgacggcgatgcacgttgcggcactactggcgctgcgcaagcaactcattccacaacttaaaaccctgacccagacgctgagtgaaaaatcccgcgcatttgccgatatcgtcaaaatcggtcgtacccacttgcaggacgcgacgctgttaacgctggggcaggagatttccggctgggtagcgatgctggagcataatctcaaacatatcgaatacagcctgcctcacgtagcggaactggc

SEQ ID NO: 766 - DNA, 469 bp, Escherichia coli
cgagcgccattcgtcaggcggcggatgaagtactggcaggacagcatgacgacgaattcccgctggctatctggcagaccggctccggcacgcaaagtaacatgaacatgaacgaagtgctggctaaccgagccagtgaattactcggcggtgtgcgcgggatggaacgtaaagttcaccctaacgacgacgtgaacaaaagccaaagttccaacgatgtctttccgacggcgatgcacgttgcggcgctgctggcgctgcgcaagcaactcattcctcagcttaaaaccctgacacagacactgaatgagaaatcccgtgcttttgccgatatcgtcaaaattggtcgtactcacttgcaggatgccacgccgttaacgctggggcaggagatttccggctgggtagcgatgctcgagcataatctcaaacatatcgaatacagcctgcctcacgtagcggaactggc

SEQ ID NO: 767 - DNA, 469 bp, Escherichia coli
cgagcgccattcgtcaggcggcggatgaagtactggcaggacagcatgacgacgaattcccgctggctatctggcagaccggctccggcacgcaaagtaacatgaacatgaacgaagtgctggctaaccgggccagtgaattactcggcggtgtgcgcgggatggaacgtaaagttcaccctaacgacgacgtgaacaaaagccaaagttccaacgatgtctttccgacggcgatgcacgttgcggcgctgctggcgctgcgcaagcaactcattcctcagcttaaaaccctgacacagacactgaatgagaaatcccgtgcttttgccgatatcgtcaaaattggtcgtactcacttgcaggatgtcacgccgttaacgctggggcaggagatttccggctgggtagcgatgctcgagcataatctcaaacatatcgaatacagcctgcctcacgtagcggaactggc

SEQ ID NO: 768 - DNA, 469 bp, Escherichia coli
cgagcgccattcggcaggcggcggatgaagtactggcaggacagcatgacgacgaattcccgctggctatctggcagaccggctccggcacgcaaagtaacatgaacatgaacgaagtgctggctaaccgggccagtgaattactcggcggcgtgcgcgggatggaacgtaaagttcaccctaacgatgacgtgaacaaaagccaaagttccaacgatgtctttccgacggcgatgcacgttgcggcgctgctggcgctgcgcaagcaactcattccgcagcttaaaaccctgacacagacactgaatgagaaatcccgtgcatttgccgatatcgtcaaaattggtcgtactcacttgcaggatgccacgccgttaacactggggcaggagatttccggctgggtagcgatgctcgagcataatctcaaacatatcgaatacagcctgcctcacgtagcggaactggc

SEQ ID NO: 769 - DNA, 469 bp, Escherichia coli
cgagcgccattcggcaggcggcggatgaagtattggcaggacagcatgacgacgaattcccgctggcaatctggcagaccggctccggcacgcaaagtaatatgaacatgaacgaagtgctggctaatcgggccagtgaattacttggcggcgtgcgcgggatggagcgtaaagttcaccctaacgacgacgtgaacaaaagccaaagttccaatgatgtctttccgacggcgatgcacgttgcggcgctactggcgctgcgcaagcaactcattccgcagcttaaaaccttgacacagacgctgaatgagaaatcgcgcgcatttgccgatatcgtcaaaattggtcgtacccacttgcaggatgccacgccgctaacactggggcaggagatttccggctgggtagcgatgctggagcataatctcaaacatatcgaatacagcctgccgcatgtagcggaactggc

SEQ ID NO: 770 - DNA, 469 bp, Escherichia coli
cgagcgccattcggcaggcggcggatgaagtactggcaggacagcatgacgacgaattcccgctggctatctggcagaccggctccggcacgcaaagtaacatgaacatgaacgaagtgctggctaaccgggccagtgaattactcggcggcgtgcgcgggatggaacgtaaagttcaccctaacgacgacgtgaacaaaagccaaagttccaacgatgtctttccgacggcgatgcacgttgcggcgctgctggcgctgcgcaagcaactcattccgcagcttaaaaccctgacacagacactgagtgaaaaatcgcgtgcatttgccgatatcgtcaaaatcggtcgaacccacttgcaggacgccacgccgctaacactagggcaggagatttccggctgggtagcgatgctcgagcataatctcaaatatatcgaatacagcctgcctcacgtagcggaactggc

SEQ ID NO: 771 - DNA, 469 bp, Escherichia coli
cgagcgccattcgtcaggctgcggatgaagtgctggcggggcagcatgatgatgaattcccgctggcaatctggcagaccggttctggcacacaaagtaacatgaacatgaacgaagtgctggccaatcgggcgagtgaactgctcggcggcgtgcgcgggatggaacgtaaagttcaccctaacgacgacgtgaacaaaagccaaagttccaacgatgtctttccgacggcgatgcacgttgcggcgctgctggcgctgcgcaagcaactcattccgcagcttaaaaccctgacacagacgctgagtgaaaaatcgcgtgcatttgccgatatcgtaaaaatcggtcgaacccacttgcaggacgccaccccgctaacactggggcaggagatttccggctgggtagcgatgctcgagcataatcttaaacatatcgaatacagcctgcctcacgtagcggaactggc

SEQ ID NO: 772 - DNA, 469 bp, Escherichia coli
cgagcgccattcggcaggcggcggatgaagtactggcaggacagcatgacgacgaattcccgctggctatctggcagaccggctccggcacgcaaagtaacatgaacatgaacgaagtgctggctaaccgggccagtgaattactcggcggcgtgcgcgggatggaacgtaaagttcaccctaacgacgaggtgaacaaaagccaaagttccaacgatgtctttccgacggcgatgcacgttgcggcgctgctggcgctgcgcaagcaactcattccgcagcttaaaaccctgacacagacactgagtgaaaaatcgcgtgcatttgccgatatcgtcaaaatcggtcgaacccacttgcaggacgccacgccgctaacactagggcaggagatttccggctgggtagcgatgctcgagcataatctcaaacatatcgaatacagcctgcctcacgtagcggaactggc

SEQ ID NO: 773 - DNA, 469 bp, Escherichia coli
cgagagccattcgccaggcggcggatgaagtgctggcaggacaacatgatgatgagttcccgctggcaatctggcaaacgggatccggtacgcaaagcaatatgaatatgaatgaagtactggctaaccgggccagcgaattgcttggcggcgtacgcggaatggaacgtaaagttcaccctaacgatgacgtgaacaaaagccaaagctccaatgatgtcttcccaactgctatgcacgtggcggcgttattggcactgcgtaagcaactcattcctcagctcaaaaacctcactcaaactctgaatgagaaatcgcgcgcatttgccgatatcgtcaaaattggtcgtacccacttgcaggacgccacaccgctgactctgggacaggagatttctggttgggtagcgatgctggagcataatctcaaacatattgaatacagcctgcctcacgtagcggaactggc

SEQ ID NO: 774 - DNA, 469 bp, Escherichia coli
cgagagccattcgccaggcggcggatgaagtgctggcagggcaacatgatgatgagttcccgctggcaatctggcaaacgggatccggtacgcaaagcaatatgaatatgaatgaagtactggctaatcgggccagcgaattgcttggcggcgtacgcggaatggaacgtaaagttcaccctaacgatgacgtgaacaaaagccaaagctccaatgatgtcttcccaactgctatgcacgtagcggcgttattggcactgcgtaagcaactcattcctcagctcaaaaacctcactcaaactctgaatgagaaatcgcgcgcatttgccgatatcgtcaaaattggtcgtacccacttgcaggacgccacaccgctgaccctgggacaggagatttctggttgggtagcgatgctggagcataatctcaaacatattgaatacagcctgcctcacgtagcggaactggc

SEQ ID NO: 775 - DNA, 469 bp, Escherichia coli
cgagagccattcgccaggcggcggatgaagtgctggcagggcaacatgatgatgagttcccgctggcaatctggcaaacgggatccggtacgcaaagcaatatgaatatgaatgaagtactggctaatcgggccagcgaattgcttggcggcgtacgcggaatggaacgtaaagttcaccctaacgatgacgtgaacaaaagccaaagctccaatgatgtcttcccaactgctatgcacgtagcggcgttattggcactgcgtaagcaactcattcctcagctcaaaaacctcactcaaactctgaatgagaaatcgcgtgcatttgccgatatcgtcaaaattggtcgtacccacttgcaggacgccacaccgctgaccctgggacaggagatttctggttgggtagcgatgctggagcataatctcaaacatattgaatacagcctgcctcacgtagcggaactggc

SEQ ID NO: 776 - DNA, 469 bp, Escherichia coli
cgagagccattcgccaggcggcggatgaagtgctggcagggcaacatgatgatgagttcccgctggcaatctggcaaacgggatctggtacgcaaagcaatatgaatatgaatgaagtactggctaaccgggccagcgaattgcttggcggcgtacgcggaatggaacgtaaagttcaccctaacgatgacgtgaacaaaagccaaagctccaatgatgtcttcccaactgctatgcacgtggcggcgttattggcactgcgtaagcaactcattcctcagctcaaaaacctcactcaaactctgaatgagaaatcgcgcgcatttgccgatatcgtcaaaattggtcgtacccacttgcaggacgccacaccgctgaccctgggacaggagatttctggttgggttgcgatgctggagcataatctcaaacatattgaatacagcctgcctcacgtagcggaactggc

SEQ ID NO: 777 - DNA, 469 bp, Escherichia coli
cgagcgccattcggcaggcggcggatgaagtactggtaggacagcatgacgacgaattcccgctggctatctggcagaccggctccggcacgcaaagtaacatgaacatgaacgaagtgctggctaaccgggccagtgaattactcggcggcgtgcgcgggatggaacgtaaagttcaccctaacgacgacgtgaacaaaagccaaagttccaacgatgtctttccgacggcgatgcacgttgcggcgctgctggcgctgcgcaagcaactcattccgcagcttaaaaccctgacacagacgctgagtgaaaaatcgcgtgcatttgccgatatcgtcaaaatcggtcgaacccacttgcaggacgccacgccgctaacactggggcaggagatttccggctgggtagcgatgctcgagtataatctcaaacatatcgaatacagcctgcctcacgtagcggaactggc

SEQ ID NO: 778 - DNA, 469 bp, Escherichia coli
cgagcgccattcggcaggcggcggatgaagtactggcaggacagcatgacgacgaattcccgctggctatctggcagaccggttctggcacacaaagtaacatgaacatgaacgaagtgctggccaatcgggcgagtgaactgctcggcggcgtgcgcgggatggaacgtaaagttcaccctaacgatgacgtgaacaaaagccaaagttccaacgatgtctttccgacggcgatgcacgttgcggcgctgctggcgctgcgcaagcaactcattccgcagcttaaaaccctgacacagacgctgagtgaaaaatcgcgtgcatttgccgatatcgtaaaaatcggtcgaacccacttgcaggacgccacgccgctaacactggggcaggagatatccggctgggtagcgatgctcgagcataatctcaaacatatcgaatacagcctgcctcacgtagcggaactggc

SEQ ID NO: 779 - DNA, 469 bp, Escherichia coli
cgagagccattcgccaggcggcggatgaagtgctggcagggcaacatgatgatgagttcccgctggcaatctggcaaacgggatccggtacgcaaagcaatatgaatatgaatgaagtactggctaatcgggccagcgaattgcttggcggcgtacgcggaatggaacgtaaagttcaccctaacgatgacgtgaacaaaagccaaagctccaacgatgtcttcccaactgctatgcacgtagcggcgttattggcactgcgtaagcaactcattcctcagctcaaaaacctcactcaaactctgaatgagaaatcgcgcgcatttgccgatatcgtcaaaattggtcgtacccacttgcaggacgccacaccgctgaccctgggacaggagatttctggttgggtagcgatgctggagcataatctcaaacatattgaatacagcctgcctcacgtagcggaactggc

SEQ ID NO: 780 - DNA, 469 bp, Escherichia coli
cgagcgccattcggcagacggcggatgaagtactggcaggacagcatgacgacgaattcccgctggctatctggcagaccggctccggcacgcaaagtaacatgaatatgaacgaagtgctggctaaccgggccagtgaattactcggtggcgtgcgcgggatggaacgtaaagttcaccctaacgacgacgtgaacaaaagccaaagttccaacgatgtctttccgacggcgatgcacgttgcggcactactggcgctgcgcaagcaactcattccacaacttaaaaccctgacccagacgctgagtgaaaaatcccgcgcatttgctgatatcgtcaaaatcggtcgtacccacttgcaggacgccacgccgttaacgctggggcaggagatttccggctgggtagcgatgctggagcataatctcaaacatatcgaatacagcctgcctcacgtagcggaactggc

SEQ ID NO: 781 - DNA, 469 bp, Escherichia coli
cgagcgccattcggcaggcggcggatgaagtactggcaggacagcatgacgacgaatttccgttggctatctggcagaccggctccggcacgcaaagtaacatgaacatgaacgaagtgctggctaaccgggccagtgaattactcggcggcgtgcgcgggatggaacgtaaagttcaccctaacgacgacgtgaacaaaagccaaagttccaacgatgtctttccgacggcgatgcacgttgcggcgctgctggcgctgcgcaagcaactcattccacaacttaaaaccctgacccagacgctgagtgaaaaatcccgcgcatttgccgatatcgtcaaaatcggtcgtacccacttgcaggacgccacgccgttaacgctggggcaggagatttccggctgggtagcgatgctggagcataatctcaaacatatcgaatacagcctgcctcacgtagcggaactggc

SEQ ID NO: 782 - DNA, 469 bp, Escherichia coli
cgagcgccattcggcaggcggcggatgaagtactggcaggacagcatgacgacgaattcccgctggctatctggcagaccggctccggcacgcaaagtaacatgaacatgaacgaagtgctggctaaccgggccagtgaattactcggcggcgtgcgcgggatggaacgtaaagttcaccctaacgacgacgtgaacaaaagccaaagctccaacgatgtctttccgacggcgatgcacgttgcggcgctgctggcgctgcgcaagcaactcattccgcagcttaaaaccctgacacagacactgagtgaaaaatcgcgtgcatttgccgatatcgtcaaaatcggtcgaacccacttgcaggacgccacgccgctaacactagggcaggagatttccggctgggtagcgatgctcgagcataatctcaaacatatcgaatacagcctgcctcacgtagcggaactggc

SEQ ID NO: 783 - DNA, 469 bp, Escherichia coli
cgagcgccattcgtcaggcggcggatgaagtattggcaggacagcatgacgacgaattcccgctggcaatctggcagaccggctccggcacgcaaagtaatatgaacatgaacgaagtgctggctaatcgggccagtgaattacttggcggcgtgcgcgggatggagcgtaaagttcaccctaacgacgacgtgaacaaaagccaaagttccaatgatgtctttccgacggcgatgcacgttgcggcgctactggcgctgcgcaagcaactcattccgcagcttaaaaccctgacacagacgctgaatgagaaatcgcgcgcatttgccgatatcgtcaaaattggtcgtacccacttgcaggatgccacgccgctaacactggggcaggagatttccggctgggtagcgatgctggagcataatctcaaacatatcgaatacagcctgccgcatgtagcggaactggc

SEQ ID NO: 784 - DNA, 469 bp, Escherichia coli
cgagcgccattcgtcaggcggcggatgaagtactggcaggacagcatgacgacgaattcccgctggctatctggcagaccggctccggcacgcaaagtaacatgaacatgaacgaagtgctggctaaccgggccagtgaattactcggcggtgtgcgcgggatggaacgtaaagttcaccctaacgacgacgtgaacaaaagccaaagttccaacgatgtctttccgacggcgatgcacgttgcggtgctgctggcgctgcgcaagcaactcattcctcagcttaaaaccctgacacagacactgaatgagaaatcccgtgcttttgccgatatcgtcaaaattggtcgtactcacttgcaggatgccacgccgttaacgctggggcaggagatttccggctgggtagcgatgctcgagcataatctcaaacatatcgaatacagcctgcctcacgtagcggaactggc

SEQ ID NO: 785 - DNA, 469 bp, Escherichia coli
cgagcgccattcggcaggcggcggatgaagtactggcaggacagcatgacgacgaattcccgctggctatctggcagaccggctccggcacgcaaagtaacatgaatatgaacgaagtgctggctaaccgggccagtgaattactcggtggcgtgcgcgggatggaacgtaaagttcaccctaacgacgacgtgaacaaaagccaaagttccaacgatgtctttccgacggcgatgcacgttgcggcactactggcgctgcgcaagcaactcattccacaacttaaaaccctgacccagacgctgagtgaaaaatcccgcgcatttgctgatatcgtcaaaatcggtcgtacccacttgcaggacgccacgccgttaacgctgaggcaggagatttccggctgggtagcgatgctggagcataatctcaaacatatcgaatacagcctgcctcacgtagcggaactggc

SEQ ID NO: 786 - DNA, 469 bp, Escherichia coli
cgagcgccattcgtcaggcggcggatgaagtactggcaggacagcatgacgacgaattcccgctggctatctggcagaccggctccggcacgcaaagtaacatgaacatgaacgaagtgctggctaaccgggccagtgaattactcggcggtgtgcgcgggatggaacgtaaagttcaccctaacgatgacgtgaacaaaagccaaagttccaacgatgtctttccgacggcgatgcacgttgcggcgctgctggcgctgcgcaagcaactcattccgcagcttaaaaccctgacacagacactgaatgagaaatcccgtgcatttgccgatatcgtaaaaatcggtcgaacccacttgcaggacgccacgccgctaacactggggcaggagatttccggctgggtagcgatgctcgagcataatctcaaacatatcgaatacagcctgcctcacgtagcggaactggc

SEQ ID NO: 787 - DNA, 469 bp, Escherichia coli
cgagcgccattcgtcaggcggcggatgaagtactggcaggacagcatgacgacgaattcccgctggctatctggcagaccggctccggcacgcaaagtaatatgaacatgaacgaagtgctggctaaccgggccagtgaattacttggcggcgtgcgcgggatggagcgtaaagttcatcctaacgacgacgtgaacaaaagccaaagttccaatgatgtctttccgacggcgatgcacgttgcggcgctgctggcgctgcgcaagcaactcattccgcagcttaaaaccctgacacagacgctgagtgaaaaatcccgcgcatttgctgatatcgtcaaaatcggtcgtacccacttgcaggacgccacgccgttaacgctggggcaggagatttccggctgggtagcgatgctcgagcataatctcaaacatatcgaatacagcctgccgcatgtagcggaactggc

SEQ ID NO: 788 - DNA, 469 bp, Escherichia coli
cgagcgccattcggcaggcggcggatgaagtactggcaggacagcatgacgacgaattcccgctggctatctggcagaccggctccggcacgcaaagtaacatgaacatgaacgaagtgctggctaaccgggccagtgaattactcggcggcgtgcgcgggatggaacgtaaagttcaccctaacgacgacgtgaacaaaagccaaagttccaacgatgtctttccgacggcgatgcacgttgcggcgctgctggcgctgcgcaagcaactcattccgcagcttaaaaccctgacacagacgctgagtgaaaaatcgcgtgcatttgccgatatcgtcaaaatcggtcgaacccacttgcaggacgccacgccgctaacactggggcaggagatttccggctgggtagcgatgctcgagtataatctcaaacatatcgaatacagccttcctcacgtagcggaactggc

SEQ ID NO: 789 - DNA, 469 bp, Escherichia coli
cgagcgccattcgtcaggcggcggatgaagtactggcaggacagcatgacgacgaattcccgctggctatctggcagaccggctccggcacgcaaagtaacatgaacatgaacgaagtgctggctaaccgggccagtgaattactcggcggcgtgcgcgggatggaacgtaaagttcaccctaacgacgacgtgaacaaaagccaaagttctaacgatgtctttccaacggcgatgcacgttgcggcgctgctggcgctgcgcaagcaactcattccgcagcttaaaaccctgacacagacactgagtgaaaaatcgcttgcatttgccgatatcgtaaaaatcggtcgaacccacttgcaggacgccacgccgctaacactggggcaggagatttccggctgggtagcgatgctcgagcataatctcaaacatatcgaatacagcctgcctcacgtagcggaactggc

SEQ ID NO: 790 - DNA, 469 bp, Escherichia coli
cgagtgccattcgtcaggcggcagatgaagtgctggcgggacagcatgacgatgaatttccgctggctatctggcagaccggttccggtacgcaaagcaatatgaatatgaacgaagtgctggctaaccgggcgagcgaattgcttggcggcgtgcgtgggatggaacgtaaagttcaccctaatgacgacgtgaacaaaagccaaagttccaatgatgtctttccgacagcgatgcatgttgcggcgctgctggcgctgcgcaagcaactcattccgcagcttaaaacactgacacaaacgctgagtgagaaatcgcgcgcatttgccgatatcgtcaaaatcggtcgtacccacttgcaggacgccacgccgctgacgctggggcaggagatttctggctgggtagcgatgctggagcataatctcaaacatatcgagtacagtctgccgcacgtggcggaactggc

SEQ ID NO: 791 - DNA, 469 bp, Escherichia coli
cgagcgccattcggcaggcggcggatgaagtactggcaggacagcatgacgacgaattcccattggctatctggcagaccggctccggcacgcaaagtaatatgaacatgaacgaagtgctggctaaccgggccagtgaattacttggcggcgtgcgcgggatggagcgtaaagttcatcctaacgacgacgtgaacaaaagccaaagttccaatgatgtctttccgacggcgatgcacgttgcggcgctgctggcgctgcgcaagcaactcattccacaacttaaaaccctgacccagacgctgagtgaaaaatcgcgtgcatttgccgatatcgtcaaaatcggtcgaacccacttgcaggacgccacgccgctaacactggggcaggagatttccggctgggtagcgatgctcgagcataatctcaaacatattgaatacagcctgcctcacgtagcggaactggc

SEQ ID NO: 792 - DNA, 469 bp, Escherichia coli
cgagcgccattcgtcaggcggcggatgaagtactggcgggacagcatgacggcgaattcccgctgtctatctggcagaccggctccggcacgcaaagtaacatgaacatgaacgaagttctggctaaccgggccagtgaattactcggcggtgtgcgcgggatggaacgtaaagttcaccctaacgacgacgtgaacaaaagccaaagttccaatgatgtctttcccacggcaatgcacgttgcggcgctgctggcgctacgcaagcaactcattccacaacttaaaactttgacacaaactctaaatgagaaatcccgtgcgtttgccgacatcgtcaaaattggccgtacccatttgcaggatgccacgccgctgactctggggcaggagatttctggctgggtggcaatgcttgagcataacctcaaacatattgaatacagcctgcctcacgtggcggaactggc

SEQ ID NO: 793 - DNA, 469 bp, Escherichia coli
cgagcgccattcggcaggcggcggatgaagtactggcaggacagcatgacgacgaattcccgctggctatctggcagaccggctccggcacgcaaagtaacatgaacatgaacgaagtgctggctaaccgggccagtgaattactcggcggcgtgtgcgggatggaacgtaaagttcaccctaacgacgacgtgaacaaaagccaaagttccaacgatgtctttccgacggcgatgcacgttgcggcgctgctggcgctgcgcaagcaactcattccgcagcttaaaaccctgacacagacactgagtgaaaaatcgcgtgcatttgccgatatcgtcaaaatcggtcgaacccacttgcaggacgccacgccgctaacactagggcaggagatttccggctgggtagcgatgctcgagcataatctcaaacatatcgaatacagcctgcctcacgtagcggaactggc

SEQ ID NO: 794 - DNA, 469 bp, Escherichia coli
cgagcgccattcgtcaggcggcggatgaagtactggcaggacagcatgacgacgaattcccgctggctatctggcagaccggctccggcacgcaaagtaatatgaacatgaacgaagtgctggctaaccgggccagtgaattactcggcggtgtgcgcgggatggaacgtaaagttcaccctaacgatgacgtgaacaaaagccaaagttccaacgatgtctttccgacggcgatgcacgttgcggcgctactggcgctgcgcaagcaactcattccgcagcttaaaaccctgacacagacgctgaatgagaaatcgcgcgcatttgccgatatcgtcaaaattggtcgtacccacttgcaggatgccacgccgctaacattggggcaggagatttccggctgggtagcgatgctcgagcataatctcaaacatatcgaatacagcctgccgcatgtagcggaactggc

SEQ ID NO: 795 - DNA, 469 bp, Escherichia coli
cgagcgccattcggcaggcggcggatgaagtactggcaggacagcatgacgacgaattcccgctggctatctggcagaccggctccggcacgcaaagtaacatgaacatgaatgaagtgctggctaaccgggccagtgaattactcggcggcgtgcgcgggatggaacgtaaagttcaccctaacgacgacgtgaacaaaagccaaagttccaacgatgtctttccgacggcgatgcacgttgcggcgctgctggcgctgcgcaagcaactcattccgcagcttaaaaccctgacacagacgctgagtgaaaaatcgcgtgcatttgccgatatcgtaaaaatcggtcgaacccacttgcaggacgccacgccgctaacactggggcaggagatttccggctgggtagcgatgctcgagcataatctcaaacatatcgaatacagcctgcctcacgtagcggaactggc

SEQ ID NO: 796 - DNA, 469 bp, Escherichia coli
cgagcgccattcggcaggcggcggatgaagtactggcaggacagcatgacgacgatttcccgctggctatctggcagaccggctccggcacgcaaagtaacatgaacatgaacgaagtgctggctaaccgggccagtgaattactcggcggcgtgcgcgggatggaacgtaaagttcaccctaacgacgacgtgaacaaaagccaaagttccaacgatgtctttccgacggcgatgcacgttgcggcgctgctggcgctgcgcaagcaactcattccgcagcttaaaaccctgacacagacactgagtgaaaaatcgcgtgcatttgccgatatcgtcaaaatcggtcgaacccacttgcaggacgccacgccgctaacactagggcaggagatttccggctgggtagcgatgctcgagcataatctcaaacatatcgaatacagcctgcctcacgtagcggaactggc

SEQ ID NO: 797 - DNA, 469 bp, Escherichia coli
cgagcgccattcggcaggcggcggatgaagtactggcaggacagcatgacgacgaattcccattggctatctggcagaccggctccggcacgcaaagtaacatgaacatgaacgaagtgctggctaaccgggccagtgaattactcggcggcgtgcgtgggatggagcgtaaagttcaccctaacgacgacgtgaacaaaagccaaagttctaacgatgtctttccaacggcggtgcacgttgcggcgctgctggcgctgcgcaagcaactcattccgcagcttaaaaccctgacacagacgctgaatgagaaatcccgtgcatttgccgatatcgtcaaaattggacgtactcacttgcaggacgccacgccgctaacactggggcaggagatttccggctgggtagcgatgctggagcataatctcaaacatatcgaatacagcctgccgcatgtagcggaactggc

SEQ ID NO: 798 - DNA, 469 bp, Escherichia coli
cgagcgccattcgtcaggcggcggatgaagtactggcaggacagcatgacgacgaattcccgcttgctatctggcagaccggctccggcacgcaaagtaatatgaacatgaacgaagtgctggctaatcgggccagtgaattacttggcggcgtgcgcgggatggagcgtaaagttcatcctaacgacgacgtgaacaaaagccaaagttccaacgatgtctttccgacggcgatgcacgttgcggcgctgctggcgttgcgcaagcaactcattccacagcttaaaaccctgacacagacgctgagtgaaaaatcgcgcgcatttgccgatatcgtcaaaattggtcgtacccacttgcaggatgccacgccgctaacactggggcaggagatttccggctgggtagcgatgctcgagcataatctcaaacatatcgaatacagcctgccgcatgtagcggaactggc

SEQ ID NO: 799 - DNA, 469 bp, Escherichia coli
cgagcgccattcgtcaggcggcggatgaagtactggcaggacagcatgacgacgaattcccgctggctatctggcagaccggctccggcacgcaaagtaacatgaacatgaacgaagtgctggctaaccgggccagtgaattactcggcggcgtgcgcgggatggaacgtaaagttcaccctaacgacgacgtgaacaaaagccaaagttccaacgatgtctttccgacggcgatgcacgttgcggcgctgctggcgctgcgcaagcaactcattccgcagcttaaaaccctgacacagacactgagtgaaaaatcgcgtgcatttgccgatatcgtcaaaatcggtcgaacccacttgcaggatgccacgccgctaacactggggcaggagatttccggctgggtagcgatgctcgagcataatctcaaacatatcgaatacagcctgcctcacgtagcggaactggc

SEQ ID NO: 800 - DNA, 469 bp, Escherichia coli
cgagcgccattcgtcaggctgcggatgaagtgctggcggggcagcatgatgatgaattcccgctggcaatctggcagaccggttctggcacacaaagtaacatgaacatgaacgaagtgctggccaatcgggcgagtgaactgctcggcggtgtgcgcgggatggaacgtaaagttcaccctaacgacgacgtgaacaaaagccaaagttccaacgatgtctttccgacggcgatgcacgttgctgcgctgctggcgctgcgcaagcaactcattccgcagcttaaaaccctgacacagacgctgagtgaaaaatcgcgtgcatttgccgatatcgtaaaaatcggtcgaacccacttgcaggacgccaccccgctaacactggggcaggagatttccggctgggtagcgatgctcgagcataatcttaaacatatcgaatacagcctgcctcacgtagcggaactggc

SEQ ID NO: 801 - DNA, 469 bp, Escherichia coli
cgagcgccattcggcaggcggcggatgaagtactggcaggacagcatgacgacgaattcccgctggctatctagcagaccggctccggcacgcaaagtaacatgaacatgaacgaagtgctggctaaccgggccagtgaattactcggcggcgtgcgcgggatggaacgtaaagttcaccctaacgacgacgtgaacaaaagccaaagttccaacgatgtctttccgacggcgatgcacgttgcggcgctgctggcgctgcgcaagcaactcattccgcagcttaaaaccctgacacagacactgagtgaaaaatcgcgtgcatttgccgatatcgtcaaaatcggtcgaacccacttgcaggacgccacgccgctaacactagggcaggagatttccggctgggtagcgatgctcgagcataatctcaaacatatcgaatacagcctgcctcacgtagcggaactggc

SEQ ID NO: 802 - DNA, 469 bp, Escherichia coli
cgagcgccattcgtcaggcggcggatgaagtactggcaggacagcatgacgacgaattcctgctggctatctggcagaccggctccggcacgcaaagtaacatgaacatgaacgaagtgctggctaaccgggccagtgaattactcggcggtgtgcgcgggatggaacgtaaagttcaccctaacgacgacgtgaacaaaagccaaagttccaacgatgtctttccgacggcgatgcacgttgcggcgctgctggcgctgcgcaagcaactcattcctcagcttaaaaccctgacacagacactgaatgagaaatcccgtgcttttgccgatatcgtcaaaattggtcgtactcacttgcaggatgccacgccgttaacgctggggcaggagatttccggctgggtagcgatgctcgagcataatctcaaacatatcgaatacagcctgcctcacgtagcggaactggc

SEQ ID NO: 803 - DNA, 469 bp, Escherichia coli
cgagcgccattcggcaggcggcggatgaagtactggcaggacatcatgacgacgaattcccgctggctatctggcagaccggctccggcacgcaaagtaacatgaacatgaatgaagtgctggctaaccgggctagtgaattactcggcggcgtgcgcgggatggaacgtaaagttcaccctaacgacgacgtgaacaaaagccaaagttccaacgatgtctttccgacggcgatgcacgttgcggcgctgctggcgctgcgcaagcaactcattccgcagcttaaaaccctgacacagacgctgagtgaaaaatcgcgtgcatttgccgatatcgtaaaaatcggtcgaacccacttgcaggacgccaccccgctaacactggggcaggagatttccggctgggtagcgatgctcgagcataatctcaaacatatcgaatacagcctgcctcacgtagcggaactggc

SEQ ID NO: 804 - DNA, 469 bp, Escherichia coli
cgagcgccattcggcaggcggcggatgaagtactggcaggacagcatgacgacgaattcccgctggctatctggcagaccggctccggcacgcaaagtaacatgaacatgaacgaagtgttggctaaccgggccagtgaattactcggcggcgtgcgcgggatggaacgtaaagtccaccctaacgacgacgtgaacaaaagccaaagttccaacgatgtctttccgacggcgatgcacgttgcggcactactggcgctgcgcaagcaactcattccacaacttaaaaccctgacccagacgctgagtgaaaaatcccgcgcatttgccgatatcgtcaaaatcggtcgtacccacttgcaggacgcgacgccgttaacactggggcaggagatttccggctgggtagcgatgctggagcataatctcaaacatatcgaatacagcctgcctcacgtaacggaactggc

SEQ ID NO: 805 - DNA, 469 bp, Escherichia coli
cgagcgccattcgtcaggcggcggatgaagtactggcaggacagcatgacgacgaattcccgctggctatctggcagaccggctccggcacgcaaagtaatatgaacatgaacgaagtgctggctaatcgggccagtgaattacttggcggcgtgcgcgggatggagcgtaaagttcaccctaacgacgacgtgaacaaaagccaaagttctaacgatgtctttccaacggcgatgcacgttgcggcgctactggcgctgcgcaagcaactcattccgcagcttaaaaccctgacacagacgctgaatgagaaatcgcgcgcatttgtcgatatcgtcaaaatcggtcgaacccacttgcaggatgccacgccgttaacgctggggcaggagatttccggctgggtagcgatgctggagcataatctcaaacatattgaatacagcctgcctcacgtagcggaattggc

SEQ ID NO: 806 - DNA, 469 bp, Escherichia coli
cgagcgccattcgtcaggtggcggatgaagtactggcaggacagcatgacgacgaattcccgctggctatctggcagaccggctccggcacgcaaagtaatatgaacatgaacgaagtgctggctaatcgggccagtgaattacttggcggcgtgcgcgggatggagcgtaaagttcaccctaacgacgacgtgaacaaaagccaaagttccaatgatgtctttccgacggcgatgcacgttgcggcgctactggcgctgcgcaagcaactcattccgcagcttaaaaccctgacacagacactgaatgagaaatcccgtgcatttgccgatatcgtcaaaatcggtcgaacccacttgcaggatgccacgccgctaacactggggcaggagatttccggctgggtagcgatgctcgagcataatctcaaacatatcgaatacagcctgccgcatgtagcggaactggc

SEQ ID NO: 807 - DNA, 469 bp, Escherichia coli
cgagcgccattcggcaggcggcggatgaagtactggcaggacagcatgacgacgaattcccattggctatctggcagaccggctccggcacgcaaagtaacatgaacatgaacgaagtgctggctaaccgggccagtgaattactcggcggcgtgcgtgggatggagcgtaaagttcaccctaacgacgacgtgaacaaaagccaaagttctaacgatgtctttccaacggcgatgcacgttgcggcgctgctggcgctgcgcaagcaactcattccgcagcttaaaaccctgacacagacgctgagtgaaaaatcccgtgtatttgccgatatcgtaaaaatcggtcgaacccacttgcaggacgccacgccgctaacactggggcaggagatttccggctgggtagcgatgctcgagcataatctcaaacatattgaatacagcctgcctcacgtagcggaactggc

SEQ ID NO: 808 - DNA, 469 bp, Escherichia coli
cgagcgccattcggcaggcggcggatgaagtactggcaggacagcatgacgacgaattcccattggctatctggcagaccggttccggcacgcaaagtaacatgaacatgaacgaagtgctggctaaccgggccagtgaattactcggcggcgtgcgtgggatggagcgtaaagttcaccctaacgacgacgtgaacaaaagccaaagttctaacgatgtctttccaacggcgatgcacgttgcggcgctgctggcgctgcgcaagcaactcattccgcagcttaaaaccctgacacagacgctgagtgaaaaatcccgtgcatttgccgatatcgtaaaaatcggtcgaacccacttgcaggacgccacgccgctaacactggggcaggagatttccggctgggtagcgatgctcgagcataatctcaaacatattgaatacagcctgcctcacgtagcggaactggc

SEQ ID NO: 809 - DNA, 469 bp, Escherichia coli
cgagcgccattcgtcaggcggcggatgaagtactggcaggacagcatgacgacgaattcccgctggctatctggcagaccggctccggcacgcaaagtaacatgaacatgaatgaagtgctggctaaccgggccagtgaattactcggcggcgtgcgcgggatggaacgtaaagttcaccctaacgacgacgtgaacaaaagccaaagttccaacgatgtctttccgacggcgatgcacgttgcggcgctgctggcgctacgcaagcaactcattccacaacttaaaaccctgagccagacgctgagtgaaaaatcccgcgcatttgccgatatcgtcaaaatcggtcgtacccacttgcaggacgcgacgccgttaacgctggggcaggagatttccggctgggtagcgatgctggagcataatctcaaacatatcgaatacagcctgcctcacgtagcggaactggc

SEQ ID NO: 810 - DNA, 469 bp, Escherichia coli
cgagcgccattcggcaggcggcggatgaagtactggcaggacagcatgacgacgaattcccgctggctatctggcagaccggctccggcacgcaaagtaacatgaacatgaacgaagtgctggctaaccgggccagtgaattactcggcggcgtgcgctggatggaacgtaaagttcaccctaacgacgacgtgaacaaaagccaaagttccaacgatgtctttccgacggcgatgcacgttgcggcgctgctggcgctgcgcaagcaactcattccgcagcttaaaaccctgacacagacactgagtgaaaaatcgcgtgcatttgccgatatcgtcaaaatcggtcgaacccacttgcaggacgccacgccgctaacactagggcaggagatttccggctgggtagcgatgctcgagcataatctcaaacatatcgaatacagcctgcctcacgtagcggaactggc

SEQ ID NO: 811 - DNA, 469 bp, Escherichia coli
cgagcgccattcgtcaggcggcggatgaagtactgacaggacagcatgacgatgaattcccgctggctatctggcagaccggctccggcacgcaaagtaacatgaacatgaacgaagtgctggctaaccgggccagtgaattactcggcggcgtgcgtgggatggagcgtaaagttcaccctaacgacgacgtgaacaaaagccaaagttctaacgatgtctttccaacggcgatgcacgttgcggcgctgctggcgctgcgcaagcaactcattccgcagcttaaaaccctgacacagacactgaatgagaaatcccgtgcatttgccgatatcgtcaaaattggtcgtactcacttgcaggatgccacgccgttaacgctggggcaggagatttccggctgggtagcgatgctggagcataatctcaaacatatcgaatacagcctgcctcacgtagcggaactggc

SEQ ID NO: 812 - DNA, 469 bp, Escherichia coli
cgagcgccattcggcaggtggcggatgaagtactggcaggacagcatgacgacgaattcccgctggctatctggcagaccggctccggcacgcaaagtaacatgaacatgaacgaagtgctggctaaccgggccagtgaattactcggcggcgtgcgcgggatggaacgtaaagttcaccctaacgacgacgtgaacaaaagccaaagttccaacgatgtctttccgacggcgatgcacgttgcggcgctgctggcgctgcgcaagcaactcattccgcagcttaaaaccctgacacagacgctgagtgaaaaatcgcgtgcatttgccgatatcgtcaaaatcggtcgaacccacttgcaggacgccacgccgctaacactggggcaggagatttccggctgggtagcgatgctcgagtataatctcaaacatatcgaatacagcctgcctcacgtagcggaactggc

SEQ ID NO: 813 - DNA, 469 bp, Escherichia coli
cgagcgccattcggcaggcggcggatgaagtactggcaggacagcatgacgacgaattcccgctggctatctggcagaccggctccggcacgcaaagtaacatgaacatgaacgaagtgctggctaaccgggccagtgaattactcggcggcgtgcgcgggatggaacgtaaagttcaccctaacgacgacgtgaacaaaagccaaagttccaacgatgtctttccgactgcgatgcacgttgcggcgctgctggcgctgcgcaagcaactcattccgcagcttaaaaccctgacacagacgctgagtgaaaaatcgcgcgcatttgccgatatcgtcaaaattggtcgtacccacttgcaggatgccacgccgctaacactggggcaggagatttccggctgggtagcgatgctcgagcataatctcaaacatatcgaatacagcctgcctcacgtagcggaactggc

SEQ ID NO: 814 - DNA, 469 bp, Escherichia coli
cgagcgccattcggcaggcggcggatgaagtactggcaggacagcatgacgacgaatttccgctggctatctggcagaccggctccggcacgcaaagtaacatgaacatgaacgaagtgctggctaaccgggccagtgaattactcggcggcgtgcgcgggatggaacgtaaagttcaccctaacgacgacgtgaacaaaagccaaagttccaacgatgtctttccgacggcgatgcacgttgcggcgctgctggcgctgcgcaagcaactcattccgcagcttaaaaccctgacacagacgctgagtgaaaaatcgcgtgcatttgccgatatcgtaaaaatcggtcgaacccacttgcaggacgccacgccgctaacactggggcaggagatttccggctgggtagcgatgctcgagcataatctcaaacatatcgaatacagcctgcctcacgtagcggaactggc

SEQ ID NO: 815 - DNA, 469 bp, Escherichia coli
cgagcgccattcgtcaggcggcggatgaagtactggcaggacagcatgacgacgaattcccgctggctatctggcagaccggctccggcacgcaaagtaatatgaacatgaacgaagtgctggctaaccgggccagtgaattactcggcggcgtgcgtgggatggagcgtaaagttcaccctaacgacgacgtgaacaaaagccaaagttctaacgatgtctttccaacggcgatgcacgttgcggcgctgctggcgctgcgcaagcaactcattccgcagcttaaaaccctgacacagacactgaatgagaaatcccgtgcatttgccgatatcgtcaaaattggtcgtactcacttgcaggatgccacgccgttaacgctggggcaggagatttccggctgggtagcgatgctggagcataatctcaaacatattgaatacaacctgcctcacgtagcggaactggc

SEQ ID NO: 816 - DNA, 469 bp, Escherichia coli
cgagcgccattcggcaggcggcggatgaagtactggcaggacagcatgacgacgaattcccgctggctatctggcagaccggctccggcacgcaaagtaacatgaacatgaatgaagtgctggctaaccgggccagtgaattactcggcggcgtgcgcgggatggaacgtaaagttcaccctaacgacgacgtgaacaaaagccaaagttccaacgatgtctttccgacggcgatgcacgttgcggcgctgctggcgctgcgcaagcaactcattccgcagcttaaaaccctgacacagacgctgagtgaaaaatcgcgtgcatttgccgatatcgtaaaaatcggtcgaacccacttgcaggacgccaccccgctaacactggggcaggagatttccggctgggtagcgatgctcgagcataatctcaaacatatcgaatacagcctgcctcacgtagctgaactggc

SEQ ID NO: 817 - DNA, 469 bp, Escherichia coli
cgagcgctattcgtcaggcggcggatgaagtactggcaggacagcatgacgacgaattcccgctggctatctggcagaccggctccggcacgcaaagtaacatgaacatgaacgaagtgctggctaaccgggccagtgaattactcggcggtgtgcgcgggatggaacgtaaagttcaccctaacgacgacgtgaacaaaagccaaagttccaacgatgtctttccgacggcgatgcacgttgcggcgctgctggcgctgcgcaagcaactcattccgcagcttaaaaccctgacacagacgctgagtgaaaaatcgcgtgcatttgccgatatcgtaaaaatcggtcgaacccacttgcaggacgccacgccgctaacactggggcaggagatttccggctgggtagcgatgctcgagcataatctcaaacatatcgaatacagcctgcctcacgtagcggaactggc

SEQ ID NO: 818 - DNA, 469 bp, Escherichia coli
cgagcgccattcggcaggcggcggatgaagtactggcaggacagcatgacgacgaattcccgctggctatctggcagaccggctccggcacgcaaagtaacatgaacatgaacgaagtgctggctaaccgggccagtgaattactcggcggcgtgcgcgggatggagcgtaaagttcaccctaacgacgacgtgaacaaaagccaaagttccaacgatgtctttccgacggcgatgcacgttgcggcgctgctggcgctgcgcaagcaactcattccgcagcttaaaaccctgacacagacgctgagtgaaaaatcgcgtgcatttgccgatatcgtcaaaatcggtcgaacccacttgcaggacgccacgccgctaacactagggcaggagatttccggctgggtagcgatgctcgagcataatctcaaacatatcgaatacagcctgcctcacgtagcggaactggc

SEQ ID NO: 819 - DNA, 469 bp, Escherichia coli
cgagcgccattcgtcaggcggcggatgaagtactggcaggacagcatgacgacgaattcccgctggctatctggcagaccggctccggcacgcaaagtaatatgaacatgaacgaagtgctggctaatcgggccagtgaattacttggcggcgtgcgcgggatggagcgtaaagttcaccctaacgacgacgtgaacaaaagccaaagttccaatgatgtctttccgacggcgatgcacgttgcggcgctgctggcgctgcgcaagcaactcattccgcagcttaaaaccctgacacagacactgagtgaaaaatcgcgtgcatttgccgatatcgtcaaaatcggtcgaacccacttgcaggacgccacgccgctaacactagggcaggagatttccggctgggtagcgatgctcgagcataatctcaaacatatcgaatacagcctgcctcacgtagcggaactggc

SEQ ID NO: 820 - DNA, 469 bp, Escherichia coli
cgagcgccattcggcaggcggcggatgaagtactggcaggacagcatgacgacgaattcccgctggctatctggcagaccggctccggcacgcaaagtaacatgaatatgaacgaagtgctggctaaccgggccagtgaattactcggtggcgtgcgcgggatggaacgtaaagttcaccctaacgacgacgtgaacaaaagccaaagttccaacgatgtctttccgacggcgatgcacgttgcggcactactggcgctgcgcaagcaactcattccacaacttaaaaccctgacccagacgctgagtgaaaaatcccgcgcatttgctgatatcgtcaaaatcggtcgtacccacttgcaggacgccacgccgttaacgctggggcaggagatttccggctgggtagcgatgctggagaataatctcaaacatatcgaatacagcctgcctcacgtagcggaactggc

SEQ ID NO: 821 - DNA, 469 bp, Escherichia coli
cgagcgccattcggcaggcggcggatgaagtactggcaggacagcatgacgacgaattcccgctggctatctggcagaccggctccggcacgcaaagtaacatgaacatgaacgaagtgctggctaaccgggccagtgaattactcggcggcgtgcgcgggatggaacgtaaagttcaccctaacgacgacgtgaacaaaagccaaagttccaacgatgtctttccgacggcgatgcacgttgcggcgctgctggcgctgcgcaagcaactcattccggagcttaaaaccctgacacagacgctgagtgaaaaatcccgtgcatttgccgatatcgtcaaaatcggtcgaacccacttgcaggacgccacgccgctaacactagggcaggagatttccggctgggtagcgatgctcgagcataatctcaaacatatcgaatacagcctgcctcacgtagcggaactggc

SEQ ID NO: 822 - DNA, 469 bp, Escherichia coli
cgagcgccattcggcaggcggcggatgaagtactggcaggacagcatgacgacgaattcccgttggctatctggcagaccggctccggcacgcaaagtaacatgaacatgaacgaagtgctggctaaccgggccagtgaattactcggcggcgtgcgcgggatggaacgtaaagttcaccctaacgacgacgtgaacaaaagccaaagttccaacgatgtctttccgacggcgatgcacgttgcggcgctgctggcgctgcgcaagcaactcattccacaacttaaaaccctgacccagacgctgagtgaaaaatcccgcgcatttgccgatatcgtcaaaatcggtcgtacccacttgcaggacgccacgccgttaacgctggggcaggagatttccggctgggtagcgatgctggagcataatctcaaacatatcgaatacagcctgcctcacgtagcggaaccggc

SEQ ID NO: 823 - DNA, 469 bp, Escherichia coli
cgagcgccattcgtcaggcggcggatgaagtactggcaggacagcatgacgacgaattcccgctggctatctggcagaccggctccggcacgcaaagtaatatgaacatgaacgaagtgctggctaaccgggccagtgaattactcggcggcgtgcgtgggatggagcgtaaggttcaccctaacgacgacgtgaacaaaagccaaagttctaacgatgtctttccaacggcgatgcacgttgcggcgctgctggcgctgcgcaagcaactcattccgcagcttaaaaccctgacacagacactgaatgagaaatcgcgcgcatttgccgatatcgtcaaaatcggtcgaacccacttgcaggatgccacgccgctaacactggggcaggagatttccggctgggtagcgatgctcgagcataatctcaaacatatcgaatacagcctgccgcatgtagcggaactggc

SEQ ID NO: 824 - DNA, 469 bp, Escherichia coli
cgagcgccattcgtcaggcggcggatgaagtactggcaggacagcatgacgatgaattcccgctggctatctggcagaccggctccggcacgcaaagtaatatgaacatgaacgaagtgctggctaatcgggccagtgaattacttggcggcgtgcgcgggatggagcgtaaagttcaccctaacgacgacgtgaacaaaagccaaagttccaatgatgtctttccgacggcgatgcacgttgcggcgctactggcgctgcgcaagcaactcattccgcagcttaaaaccctgacacagacgctgaatgagaaatcgcgcgcatttgccgatatcgtcaaaattggtcgtacccacttgcaggatgccacgccgctaacactggggcaggagatttccggctgggtagcgatgctcgagcataatctcaaacatatcgaatacagcctgccgcatgtagcggaactggc

SEQ ID NO: 825 - DNA, 469 bp, Escherichia coli
cgagcgccattcgtcaggcggcggatgaagtactggcaggacagcatgacgatgaattcccgctggcaatctggcagaccggctccggcacgcaaagtaatatgaacatgaacgaagtgctggctaatcgggccagtgaattacttggcggcgtgcgcgggatggagcgtaaagttcaccctaacgacgacgtgaacaaaagccaaagttccaatgatgtctttccgacggcgatgcacgttgcggcgctactggcgctgcgcaagcaactcattccgcagcttaaaaccctgacacagacgctgaatgagaaatcgcgcgcatttgccgatatcgtcaaaattggtcgtacccacttgcaggatgccacgccgctaacattggggcaggagatttccggctgggtagcgatgctcgagcataatctcaaacatatcgaatacagcctgccgcatgtagcggaactggc

SEQ ID NO: 826 - DNA, 469 bp, Escherichia coli
cgagcgccattcgtcaggcggcggatgaagtactggcaggacagcatgacgacgaattcccgctggctatctggcagaccggctccggcacgcaaagtaacatgaacatgaacgaagtgctggctaaccgggccagtgaattactcggcggtgtgcgcgggatggaacgtaaagttcaccctaacgacgacgtgaacaaaagccaaagttccaacgatgtctttccgacggcgatgcacgttgcggcgctgctggcgctgcgcaagcaactcattcctcagcttaaaaccctgacacagacactgaatgagaaatcccgtacttttgccgatatcgtcaaaattggtcgtactcacttgcaggatgccacgccgttaacgctggggcaggagatttccggctgggtagcgatgctcgagcataatctcaaacatatcgaatacagcctgcctcacgtagcggaactggc

SEQ ID NO: 827 - DNA, 469 bp, Escherichia coli
cgagcgccattcgtcaggcggcggatgaagtactggcaggacagcatgacgacgaattcccgctggctatctggcagaccggttccggcacgcaaagtaacatgaacatgaacgaagtgctggctaaccgggccagtgaattactcggcggtgtgcgcgggatggaacgtaaagttcaccctaacgacgacgtgaacaaaagccaaagttccaacgatgtctttccgacggcgatgcacgttgtggcgctgctggcgctgcgcaagcaactcattcctcagcttaaaaccctgacacagacactgaatgagaaatcccgtgcttttgccgatatcgtcaaaattggtcgtactcacttgcaggatgccacgccgttaacgctggggcaggagatttccggctgggtagcgatgctcgagcataatctcaaacatatcgaatacagcctgcctcacgtagcggaactggc

SEQ ID NO: 828 - DNA, 469 bp, Escherichia coli
cgagcgccattcgtcaggcggcggatgaagtactggcaggacagcatgacgacgaattcccgctggctatctggcagaccggctccggcacgcaaagtaacatgaacatgaacgaagtgctggctaaccgggccagtgaattactcggcggcgtgcgcgggatggaacgtaaagttcaccctaacgacgacgtgaacaaaagccaaagttccaacgatgtctttccgacggcgatgcacgttgcggcgctgctggcgctgcgcaagcaactcattcctcagcttaaaaccctgacacagacactgaatgagaaatcccgtgcttttgccgatatcgtcaaaattggtcgtactcacttgcaggatgccacgccgttaacgctggggcaggagatttccggctgggtagcgatgctcgagcataatctcaaacatatcgaatacagcctgcctcacgtagcggaactggc

SEQ ID NO: 829 - DNA, 469 bp, Escherichia coli
cgagcgccattcggcaggcggcggatgaagtactggcaggacagcatgacgacgaattcccattggctatctggcagaccggctccggcacgcaaagtaacatgaacatgaacgaagtgctggctaaccgggccagtgaattactcggcggcgtgcgcgggatggaacgtaaagttcaccctaacgacgacgtgaacaaaagccaaagttccaacgatgtctttccgacggcgatgcacgttgcggcgctgctggcgctgcgcaagcaactcattccacaacttaaaaccctgacccagacgctgagtgaaaaatcccgcgcatttgccgatatcgtcaaaatcggtcgtacccacttgcaggacgccacgccgttaacgctggggcaggagatttccggctgggtagcgatgctggagcataatctcaaacatatcgaatacagcctgcctcacgtagcggaactggc

SEQ ID NO: 830 - DNA, 469 bp, Escherichia coli
cgagcgccattcgtcaggcggcggatgaagtactggcaggacagcatgacgacgaattcccgctggctatctggcagaccggctccggcacgcaaagtaacatgaacatgaacgaagtgctggctaaccgggccagtgaattactcggcggtgtgcgcgggatggaacgtaaagttcaccctaacgacgacgtgaacaaaagccaaagttccaacgatgtctttccgacggcgatgcacgttgcggcgctgctggcgctgcgcaagcagctcattccgcagcttaaaaccctgacacagacgctgagtgaaaaatcgcgtgcatttgccgatatcgtaaaaatcggtcgaacccacttgcaggacgccaccccgctaacactggggcaggagatttccggctgggtagcgatgctcgagcataatctcaaacatatcgaatacagcctgcctcacgtagcggaactggc

SEQ ID NO: 831 - DNA, 469 bp, Escherichia coli
cgagcgccattcggcaggcggcggatgaagtactggcaggacagcatgacgacgaattcccgctggctatctggcagaccggctccggcacgcaaagtaacatgaacatgaacgaagtgctggctaaccgggccagtgaattactcggcggcgtgcacgggatggaacgtaaagttcaccctaacgacgacgtgaacaaaagccaaagttccaacgatgtctttccgacggcgatgcacgttgcggcgctgctggcgctgcgcaagcaactcattccgcagcttaaaaccctgacacagacactgagtgaaaaatcgcgtgcatttgccgatatcgtcaaaatcggtcgaacccacttgcaggacgccacgccgctaacactagggcaggagatttccggctgggtagcgatgctcgagcataatctcaaacatatcgaatacagcctgcctcacgtagcggaactggc

SEQ ID NO: 832 - DNA, 469 bp, Escherichia coli
cgagcgccattcggcaggcggcggatgaagtactggcaggacagcatgacgatgaattcccgctggctatctggcagaccggctccggcacgcaaagtaacatgaacatgaacgaagtgctggctaaccgggccagtgaattactcggcggtgtgcgcgggatggaacgtaaagttcaccctaacgacgacgtgaacaaaagccaaagttccaacgatgtctttccgacggcgatgcacgttgcggcgctgctggcgctgcgcaagcaactcattccgcagcttaaaaccctgacacagacgctgagtgaaaaatcgcgtgcatttgccgatatcgtaaaaatcggtcgaacccacttgcaggacgccacgccgctaacactggggcaggagatttccggctgggtagcgatgctcgagcataatctcaaacatatcgaatacagcctgcctcacgtagcggaactggc

SEQ ID NO: 833 - DNA, 469 bp, Escherichia coli
ccaccgccatcatcaatgccgccgacgaggtgctggcgggcaaacatcccgacgaattcccccttgccatctggcagaccggctcaggcacccagagcaacatgaacatgaacgaggtgctggcgaaccgcgcaagcgagcttcttggcggcgtgcgcggcatggagcgcaaggtccacccgaacgatgacgtgaacaaaagccagagttccaacgacgtgttcccgacggccatgcacgtggcggccgtcatcgcaatccgcgagcagcttatcccgcagctcaacgtgcttaaatctacgcttaacgagaaagcgcaggccttccgcgacatcgttaaaattggtcgtacgcaccttcaggacgccacgccgctgacgcttggtcaggagatctccggctgggtggcaatgctggagcacaatcttaagcatatcgacaacagcctgccgcatctggcggagctggc

SEQ ID NO: 834 - DNA, 469 bp, Escherichia coli
cgagcgccattcggcaggcggcggatgaagtactggcaggacagcataacgacgaattcccgctggctatctggcagaccggctccggcacgcaaagtaacatgaacatgaacgaagtgctggctaaccgggccagtgaattactcggcggcgtgcgcgggatggaacgtaaagttcaccctaacgacgacgtgaacaaaagccaaagttccaacgatgtctttccgacggcgatgcacgttgcggcgctgctggcgctgcgcaagcaactcattccgcagcttaaaaccctgacacagacactgagtgaaaaatcgcgtgcatttgccgatatcgtcaaaatcggtcgaacccacttgcaggacgccacgccgctaacactagggcaggagatttccggctgggtagcgatgctcgagcataatctcaaacatatcgaatacagcctgcctcacgtagcggaactggc

SEQ ID NO: 835 - DNA, 469 bp, Escherichia coli
cgagcgccattcggcaggcggcggatgaagtactggcaggacagcatgacgacgaattcccattggctatctggcagactggctccggcacgcaaagtaacatgaacatgaacgaagtgctggctaaccgggccagtgaattactcggcggcgtgcgtgggatggagcgtaaagttcaccctaacgacgacgtgaacaaaagccaaagttctaacgatgtctttccaacggcgatgcacgttgcggcgctgctggcgctgcgcaagcaactcattccgcagcttaaaaccctgacacagacgctgagtgaaaaatcgcgtgtatttgccgatatcgtaaaaatcggtcgaacccacttgcaggacgccacgccgctaacactggggcaggagatttccggctgggtagcgatgctcgagcataatctcaaacatattgaatacagcctgcctcacgtagcggaactggc

SEQ ID NO: 836 - DNA, 469 bp, Escherichia coli
cgagtgctatccgtcaggcagcggatgaagtgctggcgggacagcatgacgatgaatttccgctggctatctggcagacgggttccggcacgcaaagcaacatgaatatgaacgaagtgctggccaatcgggcgagcgaactgctcggtggcgtgcgcggaatggaacgtaaagttcaccctaacgacgacgtgaacaaaagccaaagttcaaatgatgtctttccgacagcaatgcacgttgcggcgctgctggcgctacgcaagcaactcatcccgcagcttaaaacactgacacaaacgctgaatgagaaatcgcgcgcatttgccgatatcgtcaaaattggtcgtacccacttgcaggacgccacgccgctgacactgggccaggagatttccggctgggtagcgatgctggagcataatctcaaacatattgaatacagcctgccgcatgtggcggaactggc

SEQ ID NO: 837 - DNA, 469 bp, Escherichia coli
cgagcgccattcggcaggcggcggatgaagtactggcaggacagcatgacgacgaattcccgctggctatctggcagaccggctccggcacgcaaagtaacatgaacatgaacgaagtgttggctaaccgggccagtgaattactcggcggcgtgcgcgggatggaacgtaaagttcaccctaacgacgacgtgaacaaaagccaaagttccaacgatgtctttccgacggcgatgcacgttgcggcgctgctggcgctgcgcaagcaactcattccacaacttaaaaccctgacccagacgctgagtgaaaaatcccgcgcatttgccgatatcgtcaaaatcggtcgtacccacttgcaggacgccacgccgttaacgctggggcaggagatttccggctgggtagcgatgctggagcataatctcaaacatatcgaatacagcctgcctcacgtagcggaactggc

SEQ ID NO: 838 - DNA, 469 bp, Escherichia coli
cgagcgccattcggcaggcggcggatgaagtactggcaggacagcatgacgacgaattcccgctggctatctggcagaccggctccggcacgcaaagtaacatgaacatgaacgaagtgctgtctaaccgggccagtgaattactcggcggcgtgcgcgggatggaacgtaaagttcaccctaacgacgacgtgaacaaaagccaaagttccaacgatgtctttccgacggcgatgcacgttgcggcgctgctggcgctgcgcaagcaactcattccgcagcttaaaaccctgacacagacactgaatgaaaaatcgcgtgcatttgccgatatcgtaaaaatcggtcgaacccacttgcaggacgccacgccgctaacactggggcaggagatttccggctgggtagcgatgctcgagcatactctcaaacatatcgaatacagcctgcctcacgtagcggaactggc

SEQ ID NO: 839 - DNA, 469 bp, Escherichia coli
cgagcgccattcggcaggcggcggatgaagtactggcaggacagcatgacgacgaattcccgctggctatctggcagaccggctccggcacgcaaagtaacatgaacatgaacgaagtgctggctaaccgggccagtgaattactcggcggcgtgcgcgggatggaacgtaaagttcaccctaacgacgacgtgaacaaaagccaaagttccaacgatgtctttccgacggcgatgcatgttgcggcgctgctggcgctgcgcaagcaactcattccgcagcttaaaaccctgacacagacgctgagtgaaaaatcgcgtgcatttgccgatatcgtcaaaatcggtcgaacccacttgcaggacgccacgccgctaacactggggcaggagatttccggctgggtagcgatgctcgagtataatctcaaacatatcgaatacagcctgcctcacgtagcggaactggc

SEQ ID NO: 840 - DNA, 469 bp, Escherichia coli
cgagcgccattcgtcaggcggcggatgaagtactggcaggacagcatgacgacgaattcccgctggctatctggcagaccggctccggcacgcaaagtaacataaacatgaacgaagtgctggctaaccgggccagtgaattactcggcggtgtgcgcgggatggaacgtaaagttcaccctaacgacgacgtgaacaaaagccaaagttccaacgatgtctttccgacggcgatgcacgttgcggcgctgctggcgctgcgcaagcaactcattcctcagcttaaaaccctgacacagacactgaatgagaaatcccgtgcttttgccgatatcgtcaaaattggtcgtactcacttgcaggatgccacgccgttaacgctggggcaggagatttccggctgggtagcgatgctcgagcataatctcaaacatatcgaatacagcctgcctcacgtagcggaactggc

SEQ ID NO: 841 - DNA, 469 bp, Escherichia coli
cgagcgccattcgtcaggcggcggatgaagtactggcaggacagcatgatgatgaattcccgctggcaatctggcagaccggctccggcacgcaaagtaatatgaacatgaacgaagtgctggctaatcgggccagtgaattacttggcggcgtgcgcgggatggagcgtaaagttcaccctaacgacgacgtgaacaaaagccaaagttccaatgatgtctttccgacggcgatgcacgttgcggcgctactggcgctgcgcaagcaactcattccgcagcttaaaaccctgacacagacgctgaatgagaaatcgcgcgcatttgccgatatcgtcaaaattggtcgtacccacttgcaggatgccacgccgctaacactggggcaggagatttccggctgggtagcgatgctggagcataatctcaaacatatcgaatacagcctgccgcatgtagcggaactggc

SEQ ID NO: 842 - DNA, 469 bp, Escherichia coli
cgagcgccattcgtcaggcggcggatgaagtactggcaggacagcatgacgacgaattcccgctggctatctggcagaccggctccggcacgcaaagtaacatgaacatgaacgaagtgctggctaaccgggccagtgaattactcggcggtgtgcgcgggatggaacgtaaagttcaccctaacgacgacgtgaacaaaagccaaagctccaacgatgtctttccgacggcgatgcacgttgcggcgcttctggcgctgcgcaagcaactcattccgcagcttaaaaccctgacacagacactgaatgagaaatcccgtgcatttgccgatatcgtaaaaatcggtcgaacccacttgcaggacgccacgccgctaacactggggcaggagatttccggctgggtagcgatgctcgagcataatctcaaacatatcgaatacagcctgcctcacgtagcggaactggc

SEQ ID NO: 843 - DNA, 469 bp, Escherichia coli
cgagcgccattcggcaggcggcggatgaagtactggcagaacagcatgacgacgaattcccgctggctatctggcagaccggctccggcacgcaaagtaacatgaacatgaatgaagtgctggctaaccgggccagtgaattactcggcggcgtgcgcgggatggaacgtaaagttcaccctaacgacgacgtgaacaaaagccaaagttccaacgatgtctttccgacggcgatgcacgttgcggcactactggcgctgcgcaagcaactcattccacaacttaaaaccctgacccagacgctgagtgaaaaatcccgcgcatttgccgatatcgtcaaaatcggtcgtacccacttgcaggacgcgacgccgttaacgctggggcaggagatttccggctgggtagcgatgctggagcataatctcaaacatatcgaatacagcctgcctcacgtagcggaactggc

SEQ ID NO: 844 - DNA, 469 bp, Escherichia coli
cgagcgccattcggcaggcggcggatgaagtactggcaggacagcatgacgacgaattcccgctggctatctggcagaccggctccggcacgcaaagtaacatgaacatgaacgaagtgctggctaaccgggccagtgaattactcggcggcgtgcgtgggatggagcgtaaagttcaccctaacgacgacgtgaacaaaagccaaagttctaacgatgtctttccaacggcgatgcacgttgcggcgctgctggcgctgcgcaagcaactcattccgcagcttaaaaccctgacacagacactgaatgagaaatcccgtgcatttgccgatatcgtcaaaattggtcgtactcacttgcaggatgccacgccgttaacgctggggcaggagatttccggctgggtagcgatgctggagcataatctcaaacatattgaatacaacctgcctcacgtagcggaactggc

SEQ ID NO: 845 - DNA, 469 bp, Escherichia coli
cgagcgccattcgtcaggcggcggatgaagtactggcaggacagcatgacgatgaattcccgctggcaatctggcagaccggctccggcacgcaaagtaatatgaacatgaacgaagtgctggctaatagggccagtgaattacttggcggcgtgcgcgggatggagcgtaaagttcaccctaacgacgacgtgaacaaaagccaaagttccaatgatgtctttccgacggcgatgcacgttgcggcgctactggcgctgcgcaagcaactcattccgcagcttaaaaccctgacacagacgctgaatgagaaatcgcgcgcatttgccgatatcgtcaaaattggtcgtacccacttgcaggatgccacgccgctaacactggggcaggagatttccggctgggtagcgatgctggagcataatctcaaacatatcgaatacagcctgccgcatgtagcggaactggc

SEQ ID NO: 846 - DNA, 469 bp, Escherichia coli
cgagcgccattcggcaggcggcggatgaagtactggcaggacagcatgacgacgaattcccgctggctatctggcagaccggctccggcacgcaaagtaacatgaacatgaacgaagtgctggctaaccgggccagtgaattactcggcagcgtgcgcgggatggaacgtaaagttcaccctaacgacgacgtcaacaaaagccaaagttccaacgatgtctttccgacggcgatgcacgttgcggcgctgctggcgctgcgcaagcaactcattccgcagcttaaaaccctgacacagacgctgagtgaaaaatcgcgtgcatttgccgatatcgtcaaaatcggtcgaacccacttgcaggacgccacgccgctaacactagggcaggagatttccggctgggtagcgatgctcgagcataatctcaaacatatcgaatacagcctgcctcacgtagcggaactggc

SEQ ID NO: 847 - DNA, 469 bp, Escherichia coli
cgagcgccattcggcaggcggcggatgaagtactggcaggacatcatgacgacgaattcccgctggctatctggcagaccggctccggcacgcaaagtaacatgaacatgaacgaagtgctggctaaccgggccagtgaattactcggcggcgtgcgcgggatggaacgtaaagttcaccctaacgacgacgtgaacaaaagccaaagttccaacgatgtctttccgacggcgatgcacgttgcggcgctgctggcgctgcgcaagcaactcattccgcagcttaaaaccctgacacagacgctgagtgaaaaatcgcgtgcatttgccgatatcgtaaaaatcggtcgaacccacttgcaggacgccacgccgctaacactggggcaggagatttccggctgggtagcgatgctcgagcataatctcaaacatatcgaatacagcctgcctcacgtagcggaactggc

SEQ ID NO: 848 - DNA, 469 bp, Escherichia coli
cgagcgccattcgtcaggcggcggatgaagtactggcaggacagcatgacgatgaattcccgctggctatctggcagaccggctccggcacgcaaagtaatatgaacatgaacgaagtgctggctaaccgggccagtgaattacttggcggcgtgcgcgggatggagcgtaaagttcatcctaacgacgacgtgaacaaaagccaaagttccaatgatgtctttccgacggcgatgcacgttgcggcgctgctggcgctgcgcaagcaactcattccgcagcttaaaaccctgacacagacgctgagtgaaaaatcgcgcgcatttgccgatatcgtcaaaatcggtcgaacccacttgcaggatgccacgccgctaacactggggcaggagatttccggctgggtagcgatgctcgagcataatctcaaacatatcgaatacagcctgccgcatgtagcggaactggc

SEQ ID NO: 849 - DNA, 469 bp, Escherichia coli
cgagcgccattcgtcaggcggcggatgaagtactggcaggacagcatgacgacgaattcccgctggctatctggcagaccggctccggcacgcaaagtaacatgaacatgaacgaagtgctggctaaccgggccagtgaattactcggcggtgtgcgcgggatggaacgtaaagttcaccctaacgacgacgtgaacaaaagccaaagttccaacgatgtctttccgacggcgatgcacgttgcggcgctgctggcgctgcgcaagcaactcattcctcagcttaaaaccctgacacagacactgaatgagaaatcccgtgcttttgccgatatcgtcaaaattggtcgtactcacttgcaggatgccacgccgttaacgctcgggcaggagatttccggctgggtagcgatgctcgagcataatctcaaacatatcgaatacagcctgcctcacgtagcggaactggc

SEQ ID NO: 850 - DNA, 469 bp, Escherichia coli
cgagcgccattcggcaggcggcggatgaagtactggcaggacagcatgacgacgaattcccgctggctatctggcagaccggctccggcacgcaaagtaacatgaacatgaacgaagtgctggctaaccgggccagtgaattactcggcggcgtgcgcgggatggaacgtaaagttcaccctaacgacgacgtgaacaaaagccaaagttccaacgatgtctttccgacggcgatgcacgttgcggcgctgctggcgctgcgcaagcaactcattccgaagcttaaaaccctgacacagacgctgagtgaaaaatcgcgtgcatttgccgatatcgtcaaaatcggtcgaacccacttgcaggacgccacgccgctaacactagggcaggagatttccggctgggtagcgatgctcgagcataatctcaaacatatcgaatacagcctgcctcacgtagcggaactggc

SEQ ID NO: 851 - DNA, 469 bp, Escherichia coli
cgagcgccattcgtcaggcggcggatgaagtactggcaggacagcatgacgacgaattcccgctggctatctggcagaccggctccggcacgcaaagtaacatgaacatgaacgaagtgctggctaaccgggccagtgaattactcggcggtgtgcgcgggatggaacgtaaagttcaccctaacgacgacgtgaacaaaagccaaagttccaacgatgtctttccgacggcgatgcacgttgcggcgctgctggcgctgcgcaagcaactcattcctcagcttaaaaccctgacacagacactgaatgagaaatcccgtgcttttgccgatatcgtcaaaattggtcgtactcacttgcaggatgccacgccgttaacgctggggcaggagatttccggctgggtagcgatgctcgagcataatctcaaacatatcgaatacagcctgcctaacgtagcggaactggc

SEQ ID NO: 852 - DNA, 469 bp, Escherichia coli
cgagcgccattcggcaggcggcggatgaagtactggcaggacagcatgacgacgaattcccgctggctatctggcagaccggctccggcacgcaaagtaacatgaacatgaacgaagtgctggctaaccgggccagtgaattactcggcggtgtgcgcgggatggaacgtaaagttcaccctaacgacgacgtgaacaaaagccaaagttccaacgatgtctttccgacggcgatgcacgttgcggcgctgctggcgctgcgcaagcaactcattccgcagcttaaaaccctgacacagacgctgagtgaaaaatcgcgtgcatttgccgatatcgtcaaaattggtcgtactcacttgcaggatgccacgccgttaacgctggggcaggagatttccggctgggtagcgatgctcgagcataatctcaaacatatcgaatacagcctgcctcacgtagcggaactggc

SEQ ID NO: 853 - DNA, 463 bp, Escherichia coli
cgagcgccattcggcaggcggcggatgaagtactggcaggacagcatgacgacgaattcccgctggctatctggcagaccggctccggcacgcaaagtaacatgaacgaagtgctggctaaccgggccagtgaattactcggtggcgtgcgcgggatggaacgtaaagttcaccctaacgacgacgtgaacaaaagccaaagttccaacgatgtctttccgacggcgatgcacgttgcggcactactggcgctgcgcaagcaactcattccacaacttaaaaccctgacccagacgctgagtgaaaaatcccgcgtatttgctgatatcgtcaaaatcggtcgtacccacttgcaggacgccacgccgttaacgctggggcaggagatttccggctgggtagcgatgctcgagcataatctgaaacatatcgaatacagcctgccgcatgtagcggaactggc

SEQ ID NO: 854 - DNA, 478 bp, Escherichia coli
cgagcgccattcgtcaggcggcggatgaagtactggcaggacagcatgacgacgaattcccgctggctatctggcagaccggctccggcacgcaaagtaacatgaacatgaacgaagtgctggctaaccgggccagtgaattactcggcggtgtgcgcgggatggaacgtaaagttcaccctaacgacgacgtgaacaaaagccaaagttccaacgatgtctttccgacggcgatgcacgttgcggcgctgctggcgctgctggcgctgcgcaagcaactcattcctcagcttaaaaccctgacacagacactgaatgagaaatcccgtgcttttgccgatatcgtcaaaattggtcgtactcacttgcaggatgccacgccgttaacgctggggcaggagatttccggctgggtagcgatgctcgagcataatctcaaacatatcgaatacagcctgcctcacgtagcggaactggc
